(19) United States
(12) Patent Application Publication
(10) Pub. No.: US 2004/0077003 A1
(43) Pub. Date: Apr. 22, 2004

(54) Composition for the detection of blood cell and immunological response gene expression

(75) Inventors: Benjamin G. Cocks, Sunnyvale, CA (US); Susan G. Stuart, Montara, CA (US); Jeffrey J. Seilhamer, Los Altos Hills, CA (US)

Correspondence Address: INCYTE CORPORATION, 3160 PORTER DRIVE, PALO ALTO, CA, 94304, US

(73) Assignee: Incyte Corporation, Palo Alto, CA (US)

(21) Appl. No.: 10/641,643

(22) Filed: Aug. 14, 2003

Related U.S. Application Data
(63) Continuation of application No. 09/023,655, filed on Feb. 9, 1998, now Pat. No. 6,607,879.

(51) Int. Cl. C12Q 1/68; C07H 21/04

(52) U.S. Cl. 435/6; 536/24.3

(57) ABSTRACT

The present invention relates to a composition comprising a plurality of polynucleotide probes. The composition can be used as hybridizable array elements in a microarray. The present invention also relates to a method for selecting polynucleotide probes for the composition.

[0001] This application is a continuation of U.S. application Ser. No. 09/023,655, filed Feb. 9, 1998, the entire contents of which is hereby incorporated by reference.

### FIELD OF THE INVENTION

[0002] The present invention relates to a composition comprising a plurality of polynucleotide probes for use in research and diagnostic applications.

### BACKGROUND OF THE INVENTION

[0003] DNA-based arrays can provide a simple way to explore the expression of a single polymorphic gene or a large number of genes. When the expression of a single gene is explored, DNA-based arrays are employed to detect the expression of specific gene variants. For example, a p53 tumor suppressor gene array is used to determine whether individuals are carrying mutations that predispose them to cancer. The array has over 50,000 DNA probes to analyze more than 400 distinct mutations of p53. A cytochrome p450 gene array is useful to determine whether individuals have one of a number of specific mutations that could result in increased drug metabolism, drug resistance or drug toxicity.

[0004] DNA-based array technology is especially relevant for the rapid screening of expression of a large number of genes. There is a growing awareness that gene expression is affected in a global fashion. A genetic predisposition, disease or therapeutic treatment may affect, directly or indirectly, the expression of a large number of genes. In some cases the interactions may be expected, such as where the genes are part of the same signaling pathway. In other cases, such as when the genes participate in separate signaling pathways, the interactions may be totally unexpected. Therefore, DNA-based arrays can be used to investigate how genetic predisposition, disease, or therapeutic treatment affects the expression of a large number of genes.

[0005] cDNA-based arrays have been used in discovery and analysis of inflammatory disease related genes (Heller et al. (1997) Proc. Natl. Acad. Sci USA 94: 2150-2155). A first type of array was employed to characterize the expression patterns of a class of 96 genes coding for polypeptides known to be involved in rheumatoid arthritis. This array contained preselected probes for the 96 genes. A second type of array was used to investigate gene expression patterns characteristic of blood cells. This array contained probes for 1,000 human genes randomly selected from a human blood cell cDNA library.

[0006] Current cDNA-based arrays suffer from a variety of limitations. One is the first type of array can only detect the expression patterns of a limited number of genes already associated with a disease. The expression of other, yet to be identified, relevant genes is not detected. Another is the second type of array contains probes for genes that have very little to do with the regulation of inflammation. Also, high abundance genes are likely to be over represented and low abundance genes are likely to be under represented. The present invention provides a way to overcome such limitations.

### SUMMARY OF THE INVENTION

[0007] In one aspect, the present invention provides a composition comprising a plurality of polynucleotide probes, wherein each of said polynucleotide probes comprises at least a portion of a gene implicated in blood cell biology. The plurality of polynucleotide probes can be selected from I) first polynucleotide probes, wherein each of said first polynucleotide probes comprises at least a portion of a gene differentially expressed in an immunological response; II) second polynucleotide probes, wherein each of said second polynucleotide probes comprises at least a portion of a gene abundantly expressed in an immunological response;

[0008] III) third polynucleotide probes, wherein each of said third polynucleotide probes comprises at least a portion of a gene coding for a polypeptide known to regulate blood cell biology; and IV) combinations of first, second or third polynucleotide probes.

[0009] Preferably, the plurality of polynucleotide probes comprises:

[0010] I) first polynucleotide probes, wherein each of said first polynucleotide probes comprises at least a portion of a gene differentially expressed in an immunological response; II) second polynucleotide probes, wherein each of said second polynucleotide probes comprises at least a portion of a gene abundantly expressed in an immunological response; and III) third polynucleotide probes, wherein each of said third polynucleotide probes comprises at least a portion of a gene coding for a polypeptide known to regulate blood cell biology.

[0011] Generally, first polynucleotide probes are selected by a) preparing at least one first target transcript profile from a first biological sample selected from the group consisting of hematopoietic cells and inflamed tissue and at least one first subtraction transcript profile from a noninflamed, nonhematopoietic biological sample; b) subtracting said first subtraction transcript profile from said first target profile to detect a plurality of genes that are differentially expressed in an immunological response; and c) identifying one of said detected genes that are differentially expressed in an immunological response. Second polynucleotide probes are selected by a) preparing at least one second target transcript profile from a second biological sample selected from the group consisting of hematopoietic cells and inflamed tissue to detect genes that are abundantly expressed in said second biological sample; and

[0012] b) identifying one of said detected genes that are abundantly expressed. Third polynucleotide probes are selected by a third method comprising identifying a gene coding for a polypeptide with a known function in immunological responses.

[0013] In one preferred embodiment, the composition comprises a plurality of polynucleotide probes, wherein each polynucleotide probe comprises at least a portion of a sequence selected from the group consisting of SEQ ID Nos:1-1508. In a second preferred embodiment, the composition comprises a plurality of polynucleotide probes comprising at least a portion of at least about 1000 of the sequences of SEQ ID Nos: 1-1508. In yet another embodiment, the composition comprises a plurality of polynucleotide probes wherein said polynucleotide probes comprise at least a portion of substantially all the sequences of SEQ ID Nos: 1-1508. The polynucleotide probes can be cDNAs, clone DNAs and the like.

[0014] The composition is particularly useful as hybridizable array elements in a microarray for monitoring the expression of a plurality of target polynucleotides. The microarray comprises a substrate and the hybridizable array elements. The microarray can be used, for example, in the diagnosis and treatment of an immunopathology.

[0015] In another aspect, the present invention provides an expression profile that can reflect the levels of a plurality of target polynucleotides in a sample. The expression profile comprises a microarray and a plurality of detectable complexes. Each detectable complex is formed by hybridization of at least one of said target polynucletodies to at least one of said polynucleotide probes and further comprises a labeling moiety for detection.

[0016] In yet another aspect, the present invention provides a method for identifying a plurality of polynucleotide probes. The method comprises selecting I) first polynucleotide probes, wherein each of said first polynucleotide probes comprises at least a portion of a gene differentially expressed in an immunological response; II) second polynucleotide probes, wherein each of said second polynucleotide probes comprises at least a portion of a gene abundantly expressed in an immunological response; and III) third polynucleotide probes, wherein each of said third polynucleotide probes comprises at least a portion of a gene coding for a polypeptide known to regulate blood cell biology.

### DESCRIPTION OF THE SEQUENCE LISTING AND TABLES

[0017] A portion of the disclosure of this patent document contains material which is subject to copyright protection. The copyright owner has no objection to the facsimile reproduction by anyone of the patent document or the patent disclosure, as it appears in the Patent and Trademark Office patent file or records, but otherwise reserves all copyright rights whatsoever.

[0018] The Sequence Listing is a compilation of nucleotide sequences obtained by sequencing clone inserts (isolates) of different cDNA libraries. Each sequence is identified by a sequence identification number (SEQ ID No:), by the clone number from which it was obtained and by the cDNA library from which the sequence was obtained.

[0019] In accordance with the requirements of 37 CFR §1.821-1.825, and by waiver of 37 CFR § 1.2 and in compliance with new rule 37 CFR §1.52(e), Applicants hereby submit (in duplicate) two (2) identical Compact Disk-Recordable (CD-R) discs, each containing the Sequence Listing for the application. These CD-Rs are provided in compliance with 37 CFR §1.821 et seq. and as permitted by 37 CFR §1.52(e). Each file recorded on the CD-R is formatted in plain ASCII text. CD-R 1 is identified as “Copy 1 of 2”, file name: pa00011con_seqlist, created Aug. 11, 2003 and is 3.25 MB in size. CR—R 2 is identified as “Copy 2 of 2” and is an exact copy of CD-R 1. CD-R 3 is identified as “Copy 3” and is also an exact copy of CD-R 1 in the computer readable form (the CRF) of the Sequence Listing. The contents of each CD-R identified above are incorporated by reference herein in their entirety.

[0020] Table 1 is a list if the sequences according to the SEQ ID Nos:. For SEQ ID Nos: 1-854 (homologous to polypeptide or nucleotide sequences found in GenBank, GenPept or BLOCKS databases), the first column contains Incyte clone numbers. The second column contains relevant GenBank Identification numbers, if any. The last column contains an annotation associated with the referenced GenBank identification numbers, if any. For SEQ ID Nos: 855-1508 (exact matches to GenBank) the first column contains the GenBank identification number and the second column contains an annotation associated with the referenced GenBank identification number.

[0021] Table 2 is a list of the cDNA libraries and a description of the preparation of the cDNA libraries.

[0022] FIG. 1 is an image derived from an experiment where gene expression of untreated THP1 cells is investigated using a microarray comprising cDNA polynucleotide probes.

[0023] FIG. 2 is an image derived from an experiment where gene expression of treated THP cells is investigated using a microarray comprising cDNA polynucleotides.

### DESCRIPTION OF THE INVENTION

[0024] Definitions

[0025] The term “microarray” refers to an ordered arrangement of hybridizable array elements. The array elements are arranged so that there are preferably at least one or more different array elements, more preferably at least 100 array elements, and most preferably at least 1,000 array elements, on a 1 cm² substrate surface. The maximum number of array elements is unlimited, but is at least 100,000 array elements. Furthermore, the hybridization signal from each of the array elements is individually distinguishable. In a preferred embodiment, the array elements comprise polynucleotide probes.

[0026] A “polynucleotide” refers to a chain of nucleotides. Preferably, the chain has from about 100 to 10,000 nucleotides, more preferably from about 150 to 3,500 nucleotides. The term “probe” refers to a polynucleotide sequence capable of hybridizing with a target sequence to form a polynucleotide probe/target complex. A “target polynucleotide” refers to a chain of nucleotides to which a polynucleotide probe can hybridize by base pairing. In some instances, the sequences will be complementary (no mismatches). In other instances, there may be a 10% mismatch.

[0027] A “plurality” refers preferably to a group of at least one or more members, more preferably to a group of at least about 100, and even more preferably to a group of at least about 1,000, members. The maximum number of members is unlimited, but is at least about 100,000 members.

[0028] A “portion” means a stretch of at least about 100 consecutive nucleotides. A “portion” can also mean a stretch of at least 100 consecutive nucleotides that contains one or more deletions, insertions or substitutions. A “portion” can also mean the whole coding sequence of a gene. Preferred portions are those that lack secondary structure as identified by using computer software programs such as OLIO 4.06 Primer Analysis Software (National Biosciences), Lasergene (DNASTAR), MacDNAsis (Hitachi Software Engineering Co., Ltd.) and the like.

[0029] The term “gene” or “genes” refers to the partial or complete coding sequence of a gene. The phrase “genes implicated in blood cell biology” refers to genes that code for polypeptides that are known to regulate blood cell biology and genes of unknown function which are differentially or abundantly expressed in hematopoiesis or immunological responses and include those listed in the Sequence Listing and in Table 1.

[0030] The phrase “differentially expressed gene” refers to a gene whose abundance in a target transcript profile is preferably at least about 1.5× higher, more preferably about 2× higher, than that in a subtraction transcript profile. The phrase also refers to genes that are not detectable in the subtraction transcript profile but are preferably at levels of at least about 2 copies per cell, more preferably at least about 3 copies per cell, in the target transcript profile. “Abundantly expressed gene” refers to a gene which represents preferably at least about 0.01% of the transcripts in a transcript profile.

[0031] As used herein, the profile of transcripts which reflect gene expression in a particular tissue, at a particular time, is defined as a “transcript profile”. Such profiles can be generated by naming, matching, and counting all copies of related clone inserts and arranging them in order of abundance. A “target transcript profile” refers to a profile derived from a biological sample that contains transcripts of interest along side transcripts which are not of interest. A “subtraction transcript profile” refers to a profile derived from a biological sample that contains predominantly transcripts that are not of interest.

[0032] The phrase “blood cell biology” encompasses hematopoeisis and all variety of immunological responses, including T cell and B cell activation, monocyte activation, and the like, and immunopathology.

[0033] “Hematopoeisis” refers to the process of blood cell growth and differentiation. “Immunological response” refers to responses elicited from blood cells including normal and immunopathological responses.

[0034] The phrase “genes coding for a polypeptide known to regulate blood cell biology” refers to genes whose known function is related to immunological responses, such as cytokines, chemokines, growth factors, transcription factors, leukotrienes, cell surface receptors, phosphatases and the like.

[0035] The term “hematopoietic cells” include erythrocytes, neutrophils, eosinophil, basophils, mast cells, megakaryocytes, platelets, monocytes, macrophages, dendritic cells, T lymphocytes, B lymphocytes, natural killer cells and the like. Furthermore, the term includes cells from tissues such as spleen, thymus, adenoid gland, fetal liver tissue and the like.

### THE INVENTION

[0036] The present invention provides a composition comprising a plurality of polynucleotide probes comprising at least a portion of genes implicated in blood cell biology. Preferably, the polynucleotide probes comprise at least a portion of one or more of the sequences (SEQ ID Nos: 1-1508) presented in the Sequence Listing. In one preferred embodiment, the composition comprises a plurality of polynucleotide probes, wherein each polynucleotide probe comprises at least a portion of a sequence selected from the group consisting of SEQ ID Nos: 1-1508. In a second preferred embodiment, the composition comprises a plurality of polynucleotide probes comprising at least a portion of at least about 1000 of the sequences of SEQ ID Nos: 1-1508. In yet another embodiment, the composition comprises a plurality of polynucleotide probes wherein said polynucleotide probes comprise at least a portion of substantially all the sequences of SEQ ID Nos: 1-1508.

[0037] The composition is particularly useful when it is used as hybridizable array elements in a microarray. Such a microarray can be employed to monitor the expression of genes of unknown function, but which are differentially or abundantly expressed in an immunological response or an immunopathology. In addition, the microarray can be used to monitor the expression of genes with a known function in blood cell biology.

[0038] The microarray can be used for large scale genetic or gene expression analysis of a large number of target polynucleotides. The microarray can be used in the diagnosis of diseases and in the monitoring of treatments where altered expression of genes implicated in blood cell biology cause disease, such as cancer, an immunopathology and the like. The microarray can also be used to investigate an individual's predisposition to a disease, such as cancer, an immunopathology and the like. Furthermore, the microarray can be employed to investigate cellular responses, such as stress responses, apoptosis, cell proliferation and the like.

[0039] When the composition of the invention is employed as hybridizable array elements in a microarray, the array elements are organized in an ordered fashion so that each element is present at a specified location on the substrate. Because the array elements are at specified locations on the substrate, the hybridization patterns and intensities (which together create a unique expression profile) can be interpreted in terms of expression levels of particular genes and can be correlated with a particular disease or condition or treatment.

[0040] The composition comprising a plurality of polynucleotide probes can also be used to purify a subpopulation of mRNAs, cDNAs, genomic fragments and the like, in a sample. Typically, samples will include the target polynucleotides of interest and other nucleic acids which may enhance the hybridization background in the sample. Therefore it may be advantageous to remove these nucleic acids. One method for removing the additional nucleic acids is by hybridizing the sample containing target polynucleotides with immobilized polynucleotide probes under hybridizing conditions. Those nucleic acids that do not hybridize to the polynucleotide probes are washed away. At a later point, the immobilized target polynucleotide probes can be released in the form of purified target polynucleotides.

[0041] Method for Selecting Polynucleotide Probes

[0042] This section describes the selection of probe sequences for the plurality of polynucleotide probes. The probe sequences are selected by identifying genes coding for polypeptides with a known function in immunological responses or genes which are abundantly or differentially expressed in specific biological samples. Since some of the probe sequences are identified solely based on expression levels, it is not essential to know a priori the function of a particular gene in blood cell biology.

[0043] The selection method is based, in part, on expression sequence tag (EST) analysis. EST analysis entails sequencing, in whole or in part, isolated clone inserts from a complementary DNA (cDNA) library, clustering overlapping sequences and determining the clustered sequences' frequency in the cDNA library.

[0044] ESTs are sequenced by methods well known in the art. The methods can employ such enzymes as the Klenow fragment of DNA polymerase I, Taq polymerase, thermostable T7 polymerase, or combinations of polymerases and proofreading exonucleases. Preferably, the process is automated. ESTs derived from the same transcript can be combined to form a cluster of ESTs. Clusters are formed by identifying overlapping EST sequences and assembling the ESTs. A nucleic acid fragment assembly tool, such as the Phrap tool (WashU-Merck) and the GELVIEW Fragment Assembly system (Genetics Computer Group), can be used for this purpose. Clones can be arranged in clusters in descending order of abundance. The minimum number of clones necessary to constitute a cluster is two.

[0045] After assembling EST clusters, a transcript profile for a particular biological sample is generated and the frequency or abundance of a given EST cluster can be determined. The frequency of an EST cluster in a clone population is correlated to the level of expression of a particular gene. By this process those genes that are abundantly expressed in a biological sample can be identified.

[0046] Furthermore, EST analysis can be employed to identify genes that are differentially expressed in one biological sample (from which a target cDNA library and a target transcript profile are derived) but not in another biological sample (from which a subtraction cDNA library and a subtraction transcript profile are derived). For this purpose, transcript profiles from both biological samples are generated compared. By comparing transcript profiles those genes that are differentially expressed in a target biological sample can be identified.

[0047] With a large enough number of transcript profiles derived from different biological samples, a statistically significant correlation can emerge between cell and tissue source information, such as disease states, treatment outcomes, exposure to various environmental factors or genotypes, and the expression levels of particular genes or groups of genes. Comparisons between transcript profiles of different cells or tissues or of the same cells or tissues under different conditions can be used to discern differences in transcriptional activities. For example, a transcript profile can show differences occurring between two different tissues, such as liver and prostate; between normal and diseased tissue, such as normal and prostate tumor or between untreated and treated tissues, such as prostate tumor and irradiated prostate tumor.

[0048] The biological samples from which transcript profiles are derived can be from a variety of sources. For purposes of this invention, since the intent is to select polynucleotide probes useful for investigating gene expression as it relates to blood cell biology, biological samples include those derived from hematopoietic and inflamed samples and nonhematopoietic, noninflamed biological samples.

[0049] In particular, where probe sequences are derived from genes differentially expressed in an immunological response, the transcript profiles of hematopoietic cells or tissues associated with an immunological response (normal or inflamed) are compared to those of noninflamed nonhematopoietic samples. Examples of hematopoietic cells or tissues associated with an immunological response include inflamed adenoid, bone marrow, macrophages, lymphocytes, granulocytes, spleen, tonsil, eosinophil, asthmatic lung tissue, diabetic pancreas, colon tissue derived from an individual suffering from Crohn's disease and the like. Examples of noninflamed nonhematopoietic tissue include fibroblasts, keratinocytes, fetal lung, brain, melanocytes and the like. Only those genes that are differentially expressed, i.e., the transcript levels are preferably at least about 1.5× higher, more preferably at least about 2× higher, in the hematopoietic sample than that in the nonhematopoietic sample, are selected. Additionally, genes that are not detectable in the nonhematopoietic sample but which have transcript levels of preferably at least about two (2) copies per cell, more preferably at least about three (3) copies per cell, in the hematopoeitic sample are selected.

[0050] Where probe sequences are derived from genes that are abundantly expressed in an immunological response, the transcript profiles of hematopoietic cells or tissues associated with an inflammatory process are obtained. Only those genes whose transcripts represent preferably at least 0.01% of the transcripts in a biological sample are selected.

[0051] For purposes of this invention, transcript profile comparisions can be obtained by methods well known to those skilled in the art. Transcript levels and profiles can be obtained and compared, for example, by a differential gene expression assay based on a quantitative hybridization of arrayed cDNA clones (Nguyen, et al. (1995) Genomics 29: 207-216), based on the serial analysis of gene expression (SAGE) technology (Velculescu et al. (1995) Science 270: 484-487), based on the polymerase chain reaction (Peng et al. (1992) Science 257: 967-971, Prashar et al. (1996) Proc. Natl. Acad. Sci. USA 93: 659-663), by a differential amplification protocol (Van Gelder et al. U.S. Pat. No. 5,545,522) or based on electronic analysis, such as the Lifeseq® Transcript Imaging tool (Incyte) or the GeneCalling and Quantitative Expression Analysis technology (Carageen). Comparisons (subtractions) between two of more transcript profiles are preferably performed electronically using the Lifeseq® Multiple Transcript Subsetting tool (Incyte).

[0052] Selection Protocols

[0053] The method of selecting polynucleotide probe sequences is based on three selection protocols. The polynucleotide probes of the composition can be selected by employing any one of these three selection protocols, the combination of any two of these protocols, or all the protocols.

[0054] A first selection protocol (1) can provide for first polynucleotide probes derived from genes differentially expressed in an immunological response. A number of target cDNA libraries are prepared from first biological samples. The first biological sample can be hematopoietic cells or tissues associated with an immunological response, such as inflamed tissues. Preferably at least one cDNA library, more preferably at least four cDNA libraries, are selected from hematopoietic cells or tissues associated with an immunological response. First target transcript profiles are generated from each of the libraries. Transcript profiles can be combined to obtain an averaged transcript profile. An averaged transcript profile entails adding up the transcript abundances for each transcript from each biological sample and then dividing summed up transcript abundances by the total number of biological samples.

[0055] A number of subtraction cDNA libraries are prepared from biological samples that are noninflamed and nonhematopoietic. Preferably at least one cDNA library, more preferably at least four cDNA libraries, are selected from noninflamed nonhematopoietic biological samples. First subtraction transcript profiles are generated from these cDNA libraries. Preferably, these transcript profiles are combined to obtain an averaged transcript profile.

[0056] In one embodiment, the averaged transcript image from the subtraction cDNA libraries is subtracted from each target cDNA library. In another embodiment, the averaged transcript image from the subtraction cDNA libraries is subtracted from an averaged transcript image of the target cDNA libraries.

[0057] In either case, a transcript profile is obtained showing the genes that are differentially expressed in biological samples consisting of hematopoietic cells or tissues associated with an immunological response rather than with noninflamed and nonhematopoietic biological samples. In one embodiment, the top 100 most abundant transcripts, more preferably the top 40 most abundant transcripts, are selected to generate first polynucleotide probes. In a second embodiment all upregulated transcripts are selected. By upregulated is meant that the genes are not detectable in the subtraction transcript profile but are preferably at levels of at least about 2 copies per cell, more preferably at least about 3 copies per cell, in the target transcript profile.

[0058] A second selection protocol (II) can provide for second polynucleotide probes derived from genes abundantly expressed in an immunological response. A number of target cDNA libraries are prepared from second biological samples. The second biological sample can be hematopoietic cells or tissues associated with an inflammatory process (normal or diseased). Preferably at least one cDNA library, more preferably at least four cDNA libraries, are selected from hematopoietic cells or tissues associated with an inflammatory process. Third transcript profiles are generated from such libraries. The transcripts are ranked according to abundance. Those transcripts that are most abundant are selected. Preferably the top 100 most abundant transcripts are selected from the remaining transcripts, more preferably the top 40 most abundant transcripts, including the top 20 novel sequences (i.e., not in a public database), can be selected to generate second polynucleotide probes.

[0059] In a third selection protocol (III), the literature is surveyed and sequences in GenBank and Lifeseq® (Incyte) screened to identify genes coding for polypeptides whose function is related to immunological responses. These genes can be selected to generate third polynucleotide probes.

[0060] The resulting composition can comprise polynucleotide probes that are not redundant, i.e., there is no more than one polynucleotide probe to represent a particular gene. Alternatively, the composition can contain polynucleotide probes that are redundant, i.e., a gene is represented by more than one polynucleotide probe.

[0061] The selected polynucleotide probes may be manipulated further to optimize the performance of the polynucleotide probes as hybridization probes. Some probes may not hybridize effectively under hybridization conditions due to secondary structure. To optimize probe hybridization, the probe sequences are examined using a computer algorithm to identify portions of genes without potential secondary structure. Such computer algorithms are well known in the art, such as OLIO 4.06 Primer Analysis Software (National Biosciences) or Lasergene (DNASTAR). These programs can search nucleotide sequences to identify stem loop structures and tandem repeats and to analyze G+C content of the sequence (those sequences with a G+C content greater than 60% are excluded). Alternatively, the probes can be optimized by trial and error. Experiments can be performed to determine whether probes and complementary target polynucleotides hybridize optimally under experimental conditions.

[0062] Where the number of different polynucleotide probes is desired to be greatest, the probe sequences are extended to assure that different polynucleotide probes are not derived from the same gene, i.e., the polynucleotide probes are not redundant. The probe sequences may be extended utilizing the partial nucleotide sequences derived from EST sequencing by employing various methods known in the art. For example, one method which may be employed, “restriction-site” PCR, uses universal primers to retrieve unknown sequence adjacent to a known locus (Sarkar, G. (1993) PCR Methods Applic. 2: 318-322).

[0063] Polynucleotide Probes

[0064] This section describes the polynucleotide probes. The polynucleotide probes can be DNA or RNA, or any RNA-like or DNA-like material, such as peptide nucleic acids, branched DNAs and the like.

[0065] The polynucleotide probes can be sense or antisense polynucleotide probes. Where target polynucleotides are double stranded, the probes may be either sense or antisense strands. Where the target polynucleotides are single stranded, the nucleotide probes are complementary single strands.

[0066] In one embodiment, the polynucleotide probes are cDNAs. The size of the DNA sequence of interest may vary, and is preferably from about 100 to 10,000 nucleotides, more preferably about from 150 to 3,500 nucleotides.

[0067] In a second embodiment, the polynucleotide probes are clone DNAs. In this case the size of the DNA sequence of interest, i.e., the insert sequence excluding the vector DNA, may vary from 100 to 10,000 nucleotides, more preferably from 150 to 3,500 nucleotides.

[0068] The polynucleotide probes can be prepared by a variety of synthetic or enzymatic schemes which are well known in the art. The probes can be synthesized, in whole or in part, using chemical methods well known in the art. (Caruthers et al. (1980) Nucl. Acids Res. Symp. Ser. 215-233). Alternatively, the probes can be generated, in whole or in part, enzymatically.

[0069] Nucleotide analogues can be incorporated into the polynucleotide probes by methods well known in the art. The only requirement is that the incorporated nucleotide analogues must serve to base pair with target polynucleotide sequences. For example, certain guanine nucleotides can be substituted with hypoxanthine which base pairs with cytosine residues. However, these base pairs are less stable than those between guanine and cytosine. Alternatively, adenine nucleotides can be substituted with 2, 6-diaminopurine which can form stronger base pairs than those between adenine and thymidine.

[0070] Additionally, the polynucleotide probes can include nucleotides that have been derivatized chemically or enzymatically. Typical chemical modifications include derivatization with acyl, alkyl, aryl or amino groups.

[0071] The polynucleotide probes can be immobilized on a substrate. Preferred substrates are any suitable rigid or semirigid support including membranes, filters, chips, slides, wafers, fibers, magnetic or nonmagnetic beads, gels, tubing, plates, polymers, microparticles and capillaries. The substrate can have a variety of surface forms, such as wells, trenches, pins, channels and pores, to which the polynucleotide probes are bound. Preferably, the substrates are optically transparent.

[0072] Probes can be synthesized, in whole or in part, on the surface of a substrate by using a chemical coupling procedure and a piezoelectric printing apparatus, such as that described in PCT publication WO95/251116 (Baldeschweiler et al.). Alternatively, the probe can be synthesized using a self-addressable electronic device that controls when reagents are added (Heller et al. U.S. Pat. No. 5,605,662) or by photolysis using imaging fibers for light delivery (Healey et al. (1995) Science 269: 1078-80).

[0073] Complementary DNA (cDNA) can be arranged and then immobilized on a substrate. The probes can be immobilized by covalent means such as by chemical bonding procedures or UV. In one such method, a cDNA is bound to a glass surface which has been modified to contain epoxide or aldehyde groups. In another case, a cDNA probe is placed on a polylysine coated surface and then UV cross-linked (Shalon et al. PCT publication WO95/35505, herein incorporated by reference). In yet another method, a DNA is actively transported from a solution to a given position on a substrate by electrical means (Heller et al. U.S. Pat. No. 5,605,662). Alternatively, individual DNA clones can be gridded on a filter. Cells are lysed, proteins and cellular components degraded and the DNA coupled to the filter by UV cross-linking.

[0074] Furthermore, the probes do not have to be directly bound to the substrate, but rather can be bound to the substrate through a linker group. The linker groups are typically about 6 to 50 atoms long to provide exposure to the attached polynucleotide probe. Preferred linker groups include ethylene glycol oligomers, diamines, diacids and the like. Reactive groups on the substrate surface react with one of the terminal portions of the linker to bind the linker to the substrate. The other terminal portion of the linker is then functionalized for binding the polynucleotide probe.

[0075] The polynucleotide probes can be attached to a substrate by dispensing reagents for probe synthesis on the substrate surface or by dispensing preformed DNA fragments or clones on the substrate surface. Typical dispensers include a micropipette delivering solution to the substrate with a robotic system to control the position of the micropipette with respect to the substrate. There can be a multiplicity of dispensers so that reagents can be delivered to the reaction regions simultaneously.

[0076] Sample Preparation

[0077] In order to conduct sample analysis, a sample containing target polynucleotides is provided. The samples can be any sample containing target polynucleotides and obtained from any bodily fluid (blood, urine, saliva, phlegm, gastric juices, etc.), cultured cells, biopsies, or other tissue preparations. DNA or RNA can be isolated from the sample according to any of a number of methods well known to those of skill in the art. For example, methods of purification of nucleic acids are described in Laboratory Techniques in Biochemistry and Molecular Biology: Hybridization With Nucleic Acid Probes, Part I. Theory and Nucleic Acid Preparation, P. Tijssen, ed. Elsevier (1993). In one case, total RNA is isolated using the TRIZOL total RNA isolation reagent (Life Technologies) and mRNA is isolated using olio d(T) column chromatography or glass beads. Alternatively, when target polynucleotides are derived from an mRNA, the target polynucleotides can be a cDNA reverse transcribed from an mRNA, an RNA transcribed from that cDNA, a DNA amplified from that cDNA, an RNA transcribed from the amplified DNA, and the like. When the target polynucleotide is derived from DNA, the target polynucleotide can be DNA amplified from DNA or RNA reverse transcribed from DNA. In yet another alternative, the targets are target polynucleotides prepared by more than one method.

[0078] When target polynucleotides are amplified it is desirable to amplify the nucleic acid sample and maintain the relative abundances of the original sample, including low abundance transcripts. Total mRNA can be amplified by reverse transcription using a reverse transcriptase and a primer consisting of olio d(T) and a sequence encoding the phage T7 promoter to provide a single stranded DNA template.

[0079] The second cDNA strand is polymerized using a DNA polymerase and a RNAse which assists in breaking up the DNA/RNA hybrid. After synthesis of the double stranded cDNA, T7 RNA polymerase can be added and RNA transcribed from the second cDNA strand template (Van Gelder et al. U.S. Pat. No. 5,545,522). RNA can be amplified in vitro, in situ or in vivo (See Eberwine U.S. Pat. No. 5,514,545).

[0080] It is also advantageous to include quantitation controls within the sample to assure that amplification and labeling procedures do not change the true distribution of target polynucleotides in a sample. For this purpose, a sample is spiked with a known amount of a control target polynucleotide and the composition of polynucleotide probes includes reference polynucleotide probes which specifically hybridize with the control target polynucleotides. After hybridization and processing, the hybridization signals obtained should reflect accurately the amounts of control target polynucleotide added to the sample.

[0081] Prior to hybridization, it may be desirable to fragment the nucleic acid target polynucleotides. Fragmentation improves hybridization by minimizing secondary structure and cross-hybridization to other nucleic acid target polynucleotides in the sample or noncomplementary polynucleotide probes. Fragmentation can be performed by mechanical or chemical means.

[0082] The target polynucleotides may be labeled with one or more labeling moieties to allow for detection of hybridized probe/target polynucleotide complexes. The labeling moieties can include compositions that can be detected by spectroscopic, photochemical, biochemical, bioelectronic, immunochemical, electrical, optical or chemical means. The labeling moieties include radioisotopes, such as ³²P, ³³P or ³⁵S, chemiluminescent compounds, labeled binding proteins, heavy metal atoms, spectroscopic markers, such as fluorescent markers and dyes, magnetic labels, linked enzymes, mass spectrometry tags, spin labels, electron transfer donors and acceptors, and the like.

[0083] Exemplary dyes include quinoline dyes, triarylmethane dyes, phthaleins, azo dyes, cyanine dyes and the like. Preferably, fluorescent markers absorb light above about 300 nm, preferably above 400 nm, and usually emit light at wavelengths at least greater than 10 nm above the wavelength of the light absorbed. Specific preferred fluorescent markers include fluorescein, phycoerythrin, rhodamine, lissamine, and C3 and C5 available from Amersham.

[0084] Labeling can be carried out during an amplification reaction, such as polymerase chain and in vitro transcription reactions, or by nick translation or 5′ or 3′-end-labeling reactions. In one case, labeled nucleotides are used in an in vitro transcription reaction. When the label is incorporated after or without an amplification step, the label is incorporated by using terminal transferase or by kinasing the 5′ end of the target polynucleotide and then incubating overnight with a labeled oligonucleotide in the presence of T4 RNA ligase.

[0085] Alternatively, the labeling moiety can be incorporated after hybridization once a probe/target complex has formed. In one case, biotin is first incorporated during an amplification step as described above. After the hybridization reaction, unbound nucleic acids are rinsed away so that the only biotin remaining bound to the substrate is that attached to target polynucleotides that are hybridized to the polynucleotide probes. Then, an avidin-conjugated fluorophore, such as avidin-phycoerythrin, that binds with high affinity to biotin is added. In another case, the labeling moiety is incorporated by intercalation into preformed target/polynucleotide probe complexes. In this case, an intercalating dye such as a psoralen-linked dye can be employed.

[0086] Under some circumstances it may be advantageous to immobilize the target polynucleotides on a substrate and have the polynucleotide probes bind to the immobilized target polynucleotides. In such cases the target polynucleotides can be attached to a substrate as described above.

[0087] Hybridization and Detection

[0088] Hybridization causes a denatured polynucleotide probe and a denatured complementary target to form a stable duplex through base pairing. Hybridization methods are well known to those skilled in the art (See, for example, Laboratory Techniques in Biochemistry and Molecular Biology, Vol. 24: Hybridization With Nucleic Acid Probes, P. Tijssen, ed. Elsevier, N.Y. (1993)). Conditions can be selected for hybridization where exactly complementary target and polynucleotide probe can hybridize, i.e., each base pair must interact with its complementary base pair. Alternatively, conditions can be selected where target and polynucleotide probes have mismatches but are still able to hybridize. Suitable conditions can be selected, for example, by varying the concentrations of salt or formamide in the prehybridization, hybridization and wash solutions, or by varying the hybridization and wash temperatures.

[0089] Hybridization can be performed at low stringency with buffers, such as 6× SSPE with 0.005% Triton X-100 at 37° C., which permits hybridization between target and polynucleotide probes that contain some mismatches to form target polynucleotide/probe complexes. Subsequent washes are performed at higher stringency with buffers, such as 0.5×SSPE with 0.005% Triton X-100 at 50° C., to retain hybridization of only those target/probe complexes that contain exactly complementary sequences. Alternatively, hybridization can be performed with buffers, such as 5×SSC/0.2% SDS at 60° C. and washes are performed in 2×SSC/0.2% SDS and then in 0.1×SSC. Stringency can also be increased by adding agents such as formamide. Background signals can be reduced by the use of detergent, such as sodium dodecyl sulfate, Sarcosyl or Triton X-100, or a blocking agent, such as sperm DNA.

[0090] Hybridization specificity can be evaluated by comparing the hybridization of specificity-control polynucleotide probes to specificity-control target polynucleotides that are added to a sample in a known amount. The specificity-control target polynucleotides may have one or more sequence mismatches compared with the corresponding polynucleotide probes. In this manner, whether only complementary target polynucleotides are hybridizing to the polynucleotide probes or whether mismatched hybrid duplexes are forming is determined.

[0091] Hybridization reactions can be performed in absolute or differential hybridization formats. In the absolute hybridization format, target polynucleotides from one sample are hybridized to the probes in a microarray format and signals detected after hybridization complex formation correlate to target polynucleotide levels in a sample. In the differential hybridization format, the differential expression of a set of genes in two biological samples is analyzed. For differential hybridization, target polynucleotides from both biological samples are prepared and labeled with different labeling moieties. A mixture of the two labeled target polynucleotides is added to a microarray. The microarray is then examined under conditions in which the emissions from the two different labels are individually detectable. Probes in the microarray that are hybridized to substantially equal numbers of target polynucleotides derived from both biological samples give a distinct combined fluorescence (Shalon et al. PCT publication WO95/35505). In a preferred embodiment, the labels are fluorescent labels with distinguish-able emission spectra, such as a lissamine conjugated nucleotide analog and a fluorescein conjugated nucleotide analog. In another embodiment C3/C5 fluorophores (Amersham) are employed.

[0092] After hybridization, the microarray is washed to remove nonhybridized nucleic acids and complex formation between the hybridizable array elements and the target polynucleotides is detected.

[0093] Methods for detecting complex formation are well known to those skilled in the art. In a preferred embodiment, the target polynucleotides are labeled with a fluorescent label and measurement of levels and patterns of fluorescence indicative of complex formation is accomplished by fluorescence microscopy, preferably confocal fluorescence microscopy. An argon ion laser excites the fluorescent label, emissions are directed to a photomultiplier and the amount of emitted light detected and quantitated. The detected signal should be proportional to the amount of probe/target polynucleotide complex at each position of the microarray. The fluorescence microscope can be associated with a computer-driven scanner device to generate a quantitative two-dimensional image of hybridization intensity. The scanned image is examined to determine the abundance/expression level of each hybridized target polynucleotide.

[0094] In a differential hybridization experiment, target polynucleotides from two or more different biological samples are labeled with two or more different fluorescent labels with different emission wavelengths. Fluorescent signals are detected separately with different photomultipliers set to detect specific wavelengths. The relative abundances/expression levels of the target polynucleotides in two or more samples is obtained.

[0095] Typically, microarray fluorescence intensities can be normalized to take into account variations in hybridization intensities when more than one microarray is used under similar test conditions. In a preferred embodiment, individual polynucleotide probe/target complex hybridization intensities are normalized using the intensities derived from internal normalization controls contained on each microarray.

[0096] Expression Profiles

[0097] This section describes an expression profile using the composition of this invention. The expression profile can be used to detect changes in the expression of genes implicated in blood cell biology. These genes include genes whose altered expression is correlated with cancer, immunopathology, apoptosis and the like.

[0098] The expression profile comprises the polynucleotide probes of the invention. The expression profile also includes a plurality of detectable complexes. Each complex is formed by hybridization of one or more polynucleotide probes to one or more complementary target polynucleotides. At least one of the polynucleotide probes, preferably a plurality of polynucleotide probes, is hybridized to a complementary target polynucleotide forming, at least one, preferably a plurality of complexes. A complex is detected by incorporating at least one labeling moiety in the complex. The labeling moiety has been described above.

[0099] The expression profiles provide “snapshots” that can show unique expression patterns that are characteristic of a disease or condition.

### UTILITY OF THE INVENTION

[0100] The composition comprising a plurality of polynucleotide probes can be used as hybridizable elements in a microarray. Such a microarray can be employed in several applications including diagnostics, prognostics and treatment regimens, drug discovery and development, toxicological and carcinogenicity studies, forensics, pharmacogenomics and the like.

[0101] In one situation, the microarray is used to monitor the progression of disease. Researchers can assess and catalog the differences in gene expression between healthy and diseased tissues or cells. By analyzing changes in patterns of gene expression, disease can be diagnosed at earlier stages before the patient is symptomatic.

[0102] Similarly, the invention can be used to monitor the progression of disease or the efficacy of treatment. For some treatments with known side effects, the microarray is employed to “fine tune” the treatment regimen. A dosage is established that causes a change in genetic expression patterns indicative of successful treatment. Expression patterns associated with undesirable side effects are avoided. This approach may be more sensitive and rapid than waiting for the patient to show inadequate improvement, or manifest symptoms, before altering the course of treatment.

[0103] Alternatively, animal models which mimic a disease, rather than patients, can be used to characterize expression profiles associated with a particular disease or condition. For example, a characteristic gene expression pattern for the graft versus host reaction can be generated using analogous reactions that occur when lymphocytes from one donor are mixed with lymphocytes from another donor. This gene expression data may be useful in diagnosing and monitoring the course of graft versus host reaction in a patient, in determining gene targets for intervention, and in testing novel immunosuppressants.

[0104] The composition is particularly useful for diagnosing and monitoring the progression of diseases that are associated with the altered expression of genes implicated in blood cell biology. The expression of these genes is associated with cellular processes such as hematopoiesis, immunological responses, immunopathology, cell proliferation, apoptosis, and the like. Thus, the microarray is particularly useful to diagnose immunopathologies including, but not limited to, AIDS, Addison's disease, adult respiratory distress syndrome, allergies, anemia, asthma, atherosclerosis, bronchitis, cholecystitus, Crohn's disease, ulcerative colitis, atopic dermatitis, dermatomyositis, diabetes mellitus, emphysema, atrophic gastritis, glomerulonephritis, gout, Graves' disease, hypereosinophilia, irritable bowel syndrome, lupus erythematosus, multiple sclerosis, myasthenia gravis, myocardial or pericardial inflammation, osteoarthritis, osteoporosis, pancreatitis, polymyositis, rheumatoid arthritis, scleroderma, Sjogren's syndrome, and autoimmune thyroiditis; viral, bacterial, fungal, parasitic, and protozoal infections and trauma.

[0105] The invention also allows researchers to develop sophisticated profiles of the effects of currently available therapeutic drugs. Tissues or cells treated with these drugs can be analyzed and compared to untreated samples of the same tissues or cells. In this way, an expression profile of known therapeutic agents will be developed. Knowing the identity of sequences that are differentially regulated in the presence and absence of a drug will allow researchers to elucidate the molecular mechanisms of action of that drug.

[0106] Also, researchers can use the microarray to rapidly screen large numbers of candidate drugs, looking for ones that have an expression profile similar to those of known therapeutic drugs, with the expectation that molecules with the same expression profile will likely have similar therapeutic effects. Thus, the invention provides the means to determine the molecular mode of action of a drug.

[0107] It is understood that this invention is not limited to the particular methodology, protocols, and reagents described, as these may vary. It is also understood that the terminology used herein is for the purpose of describing particular embodiments only, and is not intended to limit the scope of the present invention which will be limited only by the appended claims. The examples below are provided to illustrate the subject invention and are not included for the purpose of limiting the invention.

### EXAMPLES

[0108] I cDNA Library Construction

[0109] For purposes of example, the preparation and sequencing of the LNODNOT03 cDNA library, from which Incyte Clones 1573272, 1573553, 1574415, 1574617, 1574637, and 1576661 were isolated, is described in detail. Preparation and sequencing of cDNA libraries in the LifeSeq® database have varied over time, and the gradual changes involved use of kits, plasmids, and machinery available at the particular time the library was made and analyzed.

[0110] The LNODNOT03 cDNA library was constructed from microscopically normal lymph node tissue excised from a 67-year-old Caucasian male. This tissue was associated with tumorous lung tissue. The patient history included squamous cell carcinoma of the lower lobe, benign hypertension, arteriosclerotic vascular disease, and tobacco abuse. The patient was taking Doxycycline, a tetracycline, to treat an infection.

[0111] The frozen tissue was homogenized and lysed using a Brinkmann Homogenizer Polytron PT-3000 (Brinkmann Instruments, Westbury, N.J.) in guanidinium isothiocyanate solution. The lysate was centrifuged over a

[0112] 5.7 M CsCl cushion using an Beckman SW28 rotor in a Beckman L8-70M Ultracentrifuge (Beckman Instruments) for 18 hours at 25,000 rpm at ambient temperature. The RNA was extracted with acid phenol pH 4.7, precipitated using 0.3 M sodium acetate and 2.5 volumes of ethanol, resuspended in RNAse-free water, and DNase treated at 37° C. The RNA extraction was repeated with acid phenol pH 4.7 and precipitated with sodium acetate and ethanol as before. The mRNA was then isolated using the Qiagen Oligotex kit (QIAGEN, Inc., Chatsworth, Calif.) and used to construct the cDNA library.

[0113] The mRNA was handled according to the recommended protocols in the SuperScript Plasmid System for cDNA Synthesis and Plasmid Cloning

[0114] (Cat. #18248-013, Gibco/BRL). cDNAs were fractionated on a Sepharose CL4B column (Cat. #275105-01, Pharmacia), and those cDNAs exceeding 400 BP were ligated into pSPORT I. The plasmid pSPORT I was subsequently transformed into DH5 μm competent cells (Cat. #18258-012, Gibco/BRL).

[0115] II cDNA Library Normalization

[0116] In some cases, cDNA libraries have been normalized in a single round according to the procedure of Soares et al. ((1994), Proc. Natl. Acad. Sci. USA 91: 9928-9932) with the following modifications. The primer to template ratio in the primer extension reaction was increased from 2:1 to 10:1. The dNTP concentration in the reaction was reduced to 150 μM each dNTP, allowing the generation of longer (400-100 nt) primer extension products. The reannealing hybridization was extended from 13 to 19 hours. The single stranded DNA circles of the normalized library were purified by hydroxyapatite chromatography and converted to partially double-stranded by random priming, followed by electroporation into DH10B competent bacteria (Gibco/BRL).

[0117] The Soares normalization procedure is designed to reduce the initial variation in individual cDNA frequencies to achieve abundances within one order of magnitude while maintaining the overall sequence complexity of the library. In the normalization process, the prevalence of high-abundance cDNA clones decreases significantly, clones with mid-level abundance are relatively unaffected, and clones for rare transcripts are effectively increased in abundance. In the modified Soares normalization procedure, significantly longer hybridization times are used which allows for the increase of gene discovery rates by biasing the normalized libraries toward low-abundance cDNAs that are well represented in a standard transcript image.

[0118] III Isolation and Sequencing of cDNA Clones

[0119] Plasmid cDNA was released from the cells and purified using the REAL Prep 96 plasmid kit (Catalog #26173, QIAGEN). The recommended protocol was employed except for the following changes: 1) the bacteria were cultured in 1 ml of sterile Terrific Broth (Catalog #22711, GIBCO-BRL) with carbenicillin at 25 mg/L and glycerol at 0.4%; 2) after inoculation, the cultures were incubated for 19 hours and at the end of incubation, the cells were lysed with 0.3 ml of lysis buffer; and 3) following isopropanol precipitation, the plasmid DNA pellet was resuspended in 0.1 ml of distilled water. After the last step in the protocol, samples were transferred to a 96-well block for storage at 4° C.

[0120] cDNAs were sequenced according to the method of Sanger et al. ((1975), J. Mol. Biol. 94: 441f), using the Perkin Elmer Catalyst 800 or a Hamilton Micro Lab 2200 (Hamilton, Reno, Nev.) in combination with Peltier Thermal Cyclers (PTC200 from MJ Research, Watertown, Mass.) and Applied Biosystems 377 DNA Sequencing Systems or the Perkin Elmer 373 DNA Sequencing System and the reading frame was determined.

[0121] IV Homology Searching of cDNA Clones and Their Deduced Proteins

[0122] As used herein, “homology” refers to sequence similarity between a reference sequence and at least a portion of a newly sequenced clone insert, and can refer to either a nucleic acid or amino acid sequence. The Genbank databases which contain previously identified and annotated sequences, were searched for regions of homology using BLAST (Basic Local Alignment Search Tool). (See, e.g., Altschul, S. F. (1993) J. Mol. Evol. 36: 290-300; and Altschul et al. (1990) J. Mol. Biol. 215: 403-410.)

[0123] BLAST involves first finding similar segments between the query sequence and a database sequence, then evaluating the statistical significance of any matches that are found and finally reporting only those matches that satisfy a user-selectable threshold of significance. BLAST produces alignments of both nucleotide and amino acid sequences to determine sequence similarity. The fundamental unit of the BLAST algorithm output is the High scoring Segment Pair (HSP). An HSP consists of two sequence fragments of arbitrary, but equal lengths, whose alignment is locally maximal and for which the alignment score meets or exceeds a threshold or cutoff score set by the user.

[0124] The basis of the search is the product score, which is defined as:

$$\frac{\% sequence identity \times \% maximum BLAST score}{100}$$

[0125] The product score takes into account both the degree of similarity (identity) between two sequences and the length of the sequence match as reflected in the BLAST score. The BLAST score is calculated by scoring +5 for every base that matches in an HSP and 4 for every mismatch. For example, with a product score of 40, the match will be exact within a 1% to 2% error, and, with a product score of 70, the match will be exact. Homologous molecules are usually identified by selecting those which show product scores between 15 and 40, although lower scores may identify related molecules. The P-value for any given HSP is a function of its expected frequency of occurrence and the number of HSPs observed against the same database sequence with scores at least as high.

[0126] V Transcript Imaging

[0127] Transcript profiles were generated using the Lifeseq® Transcript Imaging tool (Incyte). To identify genes that are differentially expressed in hematopoietic or inflamed biological samples, reverse transcript profiles from specific target cDNA library pools derived from either hematopoietic or inflamed biological samples were obtained. The number of cDNA libraries in a cDNA library pool varied from one cDNA library member to 6 cDNA library members. For library pools which contained more than one member, an averaged reverse transcript image was obtained. The target library pools were the following: 1. ADENINB01; 2. COLSUCT01, COLNNOT23, SINTNOT13; 3. COLNCRT01, COLNNOT27, SINTBST01; 4. ENDCNOT01, ENDCNOT02, ENDCNOT03, HUVELPB01, HUVENOB01, HUVESTB01; 5. EOSIHET02, UCMCL5T01;

[0128] 6. HMC1NOT01; 7. LNODNOT02, LNODNOT03; 8. LUNGAST01; 9. MMLR1DT01, MMLR2DT01, MMLR3DT01; 10. NEUTFMT01, NEUTGMT01, NEUTLPT01; 11. PANCDIT01, 12. TONSNOT01; 13. SYNOOAT01; 14. SYNORAB01, SYNORAT01, SYNORAT03, SYNORAT04, SYNORAT05; 15. THP1PLB01, THP1PLB02; and 16. TMLR2DT01, TMLR3DT01, TMLR3DT02.

[0129] Reverse transcript profiles were also derived from 39 subtraction cDNA libraries which were derived from predominantly nonhematopoetic noninflamed biological samples. The following is a list of the cDNA libraries: FIBRAGT01, FIBRAGT02, FIBRANT01, FIBRNGT01, FIBRNGT02, FIBRSEM01, KERANOT01, COLNNOM01, COLNTUM01, EYECNOM01, FIBRFEM01, HNT2NOM01, OVARTUM02, PANCTUM01, UTRPNOM01, CARDFEM01, FIBRSEM01, PANCISM01, LUNGFEM01, PTHYTUM01, BRAINOM01, BRAINOM02, BRAINOM03, BRSTNOM01, BRSTNOM02, COCHFEM01, LIVRNOM01, LUNGNOM01, MELANOM01, NERVMSM01, OLFENOM01, OVARNOM01, OVARTUM01, PINENOM01, PLACNOM01, PLACNOM02, PLACNOM03, RETNNOM01, and RETNNOM02. In some cases, one or more subtraction libraries were derived from hematopoietic or inflamed biological samples, such as the NERVMSM01 library derived from the tissue of a patient suffering from multiple sclerosis. An averaged subtraction transcript profile was obtained by pooling the transcript information from all 39 libraries.

[0130] The LifeSeq Multiple Transcript Subsetting tool (Incyte) was used to subtract the averaged subtraction transcript profile from each target cDNA library pool. A list of subtracted transcripts which consisted of clustered ESTs was generated. The subtracted transcripts were ranked according to abundance. The 40 most abundant transcripts were selected from each set of subtracted library pools.

[0131] To identify additonal genes that are differentially expressed in immunological responses, reverse transcript profiles from specific target cDNA libraries derived from inflamed biological biological samples were obtained. Subtraction cDNA library transcript profiles were generated from healthy counterparts. In some cases the subtraction transcript profile was created by averaging transcript images from a pool of cDNA libraries. Target and subtraction cDNA libraries are listed in the following table.

| TARGET LIBRARY | SUBTRACTION LIBRARIES |
|---|---|
| LUNGAST01 | LUNGFEMO1, LUNGFET03, LUNGNOM01, LUNGNOTO1, |
| | LUNGNOT02, LUNGNOT03, LUNGNOT04, LUNGNOT09, |
| | LUNONOT10, LUNGNOT12, LUNGNOT14, LUNGNOT15, |
| | LUNGNOT18, LUNGNOT20 |
| COLNCRT01 | COLNNOT05 |
| HUVELPBO1 | HUVENOB01, HUVESTB01 |
| PANCDIT01 | PANCNOT01, PANCNOT04, PANCNOT05 |

[0132] A list of subtracted transcripts which consisted of clustered ESTs was generated. After subtracting transcript profiles, all upregulated sequences were selected.

[0133] To identify novel genes that are abundantly expressed in an immunological response, 43 cDNA libraries derived from hematopoietic or inflamed biological samples were picked. These libraries were: ADENINB01, AMLBNOT01, BMARNOR02, BMARNOT02, BMARNOT03, EOSIHET02, HMC1NOT01, LEUKNT02, LEUKNOT03, LNODNOT02, LNODNOT03, MMLR1DT01, MMLR2DT01, MMLR3DT01, MPHGLPT02, MPHGNOT02, MPHGNOT03, NEUTFMT01, NEUTGMT01, NEUTLPT01, THYMNOT02, TLYMNOT01, TLYMNOT02, TMLR2DT01, TMLR3DT01, TMLR3DT02, SPLNFET01, SPLNFET02, SPLNNOT02, SPLNNOT04, TBLYNOT01, THP1NOB01, THP1NOT01, THP1NOTO3, THP1AZT01, THP1PEB01, THP1PLB01, THP1PLB02, THP1T7T01, TONSNOT01, U937NOT01, UCMCL5T01, and UCMCNOT02.

[0134] Reverse transcript profiles were generated from the 43 cDNA libraries using a product score of 100 as the maximum cutoff. Using this setting returns all the sequences in the transcript profile. The top most abundant sequences were selected. Reverse transcript profiles were also generated from the chosen libraries using a product score of 70 as the maximum cutoff. This procedure effectively removed exact matches to gene sequences found in GenBank. A list of transcripts which consisted of clustered ESTs was generated. The top 20 most abundant sequences were selected.

[0135] To identify genes known to be associated with the regulation of blood cell biology, the literature was surveyed and relevant sequences in GenBank and Lifeseq® databases were identified. Genes were selected on the following basis. Genes were identified from the literature that are involved in blood cell biology. Then GenBank and Lifeseq® databases were screened to identify other genes containing homologous sequences using BLAST. Additionally, the Lifeseq® database was searched using a group of key words including cyclin, cul, phosphatase, apoptosis, kinase, serine kinase, tyrosine kinase, cdk, phosphodiesterase, protease, protease inhibitor, metalloproteinase, cathepsin, phospholipase, E2F, integrin, receptor, cytochrome, p450, cox, lipocortin, retinoic acid, CD, cdc, fas, TNF, gadd, cytokine, chemokine, growth factor, interleukin, heat shock protein, HSP, stress, STAT, myb, jun, fos, dpl, myc, bak, bcl, p53, phox, inflammation, oxidase, and glutathione.

[0136] After selecting the transcripts (ESTs) of interest, partial sets of ESTs representing a single gene were identified. Partial sets of ESTs for the same gene but identified by different selection methods were clustered. Sets of partial sequences (and their quality scores) were used to assemble contiguous sequences using the Phrap program with default settings. The longest “high quality” set of partial sequences was chosen. “High quality” is defined as sequences starting and ending with at least 10 contiguous base calls with quality scores above 12. When performing the clustering process, the full Lifeseq® database (Incyte) was searched in order to obtain the longest “high quality” set of partial sequences.

[0137] After clustering related ESTs, EST clusters were checked for redundancy. The cDNAs were compared to each other using the BLASTn database search program. Any two sequences with similarity scores greater than 250 and percent identities greater than 95% were considered redundant. A representative cDNA sequence from each redundancy set was chosen and corresponds to the EST with the longest read sequence. In some cases, the representative cDNA sequence did not originate from the original cDNA libraries used in the selection processes.

[0138] Full length cDNAs (identified from Genbank or Lifeseq®) and EST sets were also compared with each other to remove redundant sequences.

[0139] Illustrative polynucleotide probes for use in this invention are provided in the Sequence Listing and are SEQ ID Nos: 1-1508. The polynucleotide probes are derived from genes implicated in blood cell biology, including hematopoiesis, immunological responses and immuno-pathology. Of the 1,508 nonredundant polynucleotide probes 43% were exact matches to sequences in the public domain, 57% were homolgous to public domain sequences or unique sequences which are abundantly or differentially expressed in blood cell biology. Some of the public domain sequences were not known to be abundantly expressed or differentially expressed in hematopoiesis or immunological responses.

[0140] VI Preparation of a Microarray

[0141] A microarray was prepared as follows: 96 different PCR polynucleotide probes were laid down in quadruplicate (4 arrays with 100 spots each) on a aldehyde derivatized slide available from Cel Associates. The glass slide had dimensions of 18×24 mm. The distance between the spots on the array is 500 microns. Samples were printed on the glass slide from the left upper corner to the right lower corner in the following order: g177865 (Human tumor necrosis factor alpha); g177869 (Human alpha-2-macroglobulin); g178163 (Human ADP-ribosylation factor 1); g219475 (Human immediate-early-response); g179699 (Human C5a anaphylatoxin receptor); g179892 (Human cAMP phosphodiesterase); g184840 (Human Fc-gamma receptor I); g 181181 (Human cathepsin G); g 181485 (Human DNA-binding protein B); g182487 (Human Fc-epsilon-receptor gamma-chain); g182504 (Human ferritin H chain mRNA); g182632 (Human FKBP-12 protein); g182976 (Human glyceraldehyde-3-phosphate dehydrogenase); g183063 (Human glia-derived nexin); g183067 (Human mRNA sequence with homology to GDP binding protein); g31914 (Human mRNA for coupling protein G(s) alpha); g184420 (Human 90-kDa heat-shock protein); g186264 (Human gamma-interferon-inducible protein); g179579 (Human beta-thromboglobulin-like protein); g187172 (Human leukotriene A-4 hydrolase); g187220 (Human L-plastin gene); g187243 (Human lysozyme mRNA); g188255 (Human MHC class II HLA-DR-alpha); g189150 (Human nephropontin); g190813 (Human Wilm's tumor-related protein); g189267 (Human neutrophil oxidase factor; g219868 (Human HM89); g182482 (Human fibroblast collagenase inhibitor); g189546 (Human plasminogen activator inhibitor); g899458 (Human 14-3-3 protein); g184628 (Human interleukin 6); g250802 (cathepsin S); g264772 (thymosin beta-10); g28251 (beta-actin.); g291926 (Human cystatin B); g292416 (Human macrophage inflammatory protein); g29508 (Human BTG1); g181179 (Human cathepsin D); g179952 (Human cathepsin L); g186933 (Human leukocyte adhesion protein); g29793 (leukocyte antigen CD37); g184628 (Human interleukin 6); g29850 (Human CDw40 nerve growth factor); g238776 (p55); g306467 (Human binding protein mRNA); g306486 (Human cap-binding protein); g306773 (Human GM-CSF receptor); g307165 (Human myeloid cell differentiation protein); g307374 (Human RHOA proto-oncogene multi-drug-resistance); g31097 (Human mRNA for elongation factor 1 alpha); g32576 (Human mRNA for interleukin-1 receptor); g220063 (Human sphingolipid activator proteins); g186²83 (Human interleukin 1-beta); g190419 (Human secretory granule proteoglycan peptide); g33917 (Human mRNA for gamma-interferon inducible protein); g339420 (Human T cell-specific protein (RANTES)); g339688 (Human thymosin beta4 mRNA); g339690 (Human prothymosin alpha); g339737 (Human tumor necrosis factor (TNF)); g340020 (Human alpha-tubulin); g34312 (Human mRNA for lactate dehydrogenase-A); g187434 (Human monocyte chemotactic and activatinG factor); g179579 (Human beta-thromboglobulin-like protein); g34625 (Human gene for melanoma growth stimulator); g188558 (Human macrophage inflammatory protein); g181191 (Human cathepsin B proteinase); g348911 (Human glycoprotein); g337494 (Human ribosomal protein L7a); g35517 (Human mRNA for pleckstrin (P47)); g1562497 (Human poly(A)-binding protein); g338285 (Human manganese-containing superoxide dismutase); g339737 (Human tumor necrosis factor (TNF)); g404012 (Human pre-B cell enhancing factor); g495286 (Human melanoma differentiation associated factor); g416368 (Human CTLA4 counter-receptor); g433415 (Human mRNA for DNA-binding protein, TAXR); g434760 (Human mRNA for ORF); g598867 (Human HepG2 partial cDNA); g450280 (Human suilisol); g517197 (Human urokinase-type plasminogen activator); g187151 (Human lysosomal acid lipase); g468150 (Human MAP kinase); g496975 (Human cyclooxygenase-2); g186512 (Human (clone 1950.2) interferon-gamma); g560790 (Human mRNA for calgizzarin); g1255239 (Human lysosomal-associated multitransmembrane protein); g245388 (beta 2-microglobulin); g178019 (Human cytokine (SCYA2) gene); g1304482 (Human tissue inhibitor of metalloprotein); g886049 (Human Ich-2 cysteine protease); g189177 (Human nuclear factor kappa-B DNA binding protein); g37983 (Human mRNA of X-CGD gene); g178083 (Human adenylyl cyclase-associated protein); g29899 Human mRNA for c-fms proto-oncogene); and g36606 (Human spermidine/spermine N1-acetyltransferase). The 9th and the 18th rows contained controls derived from Drosophila melonogaster and Arabidopsis thaliana.

[0142] An experiment was performed to measure gene expression in A. THP1 cells and B. THP1 cells first treated with 100 ng/ml PMA (phorbol ester myristate) for 48 hours and then treated with 1 microgram/ml LPS (liposacharride) for 48 hours. THP1 cells were obtained for the American Type Culture Collection. Treated and untreated cells were lysed, mRNA was purified using oligo d(T) chromatography. The mRNA was labeled by adding oligo(dT)20 (5 micrograms) to 2 micrograms mRNA and heating the reaction to 70° C. Hybridization was performed with 5×SSC/0.2% SDS for six (6) hours at 60° C. The slides were washed with five (5) minutes in 1×SSC/0.2% SDS at 30° C. followed by five (5) minutes in 0.1×SSC/0.2 SDS at room temperature followed by 30 minutes in 0.1×SCC at room temperature. Signals were detected using a custom made confocal fluorescence microscope.

[0143] Gene expression analysis was performed to identify gene sequences which were expressed at higher levels in treated THP1 cells rather than untreated THP1 cells. FIG. 1 shows the gene expression pattern observed in untreated THP1 cells. FIG. 2 shows the gene expression pattern observed in treated THP1 cells. By a comparision of both expression patterns, those genes differentially expressed in treated THP1 cells can be identified. For example, genes that are highly expressed in treated THP1 cells include the macrophage inflammatory protein gene, the cytokine (SCYA2) gene, and beta-thromboglobulin gene among others.

What is claimed is:

1. A composition comprising a plurality of polynucleotide probes, wherein said plurality of polynucleotide probes comprise:
I) first polynucleotide probes, wherein each of said first polynucleotide probes comprises at least a portion of a gene differentially expressed in an immunological response;
II) second polynucleotide probes, wherein each of said second polynucleotide probes comprises at least a portion of a gene abundantly expressed in an immunological response; and
III) third polynucleotide probes, wherein each of said third polynucleotide probes comprises at least a portion of a gene coding for a polypeptide known to regulate blood cell biology.

2. The composition of claim 1, wherein each of said first polynucleotide probes is selected by a first method comprising:
a) preparing at least one first target transcript profile from a first biological sample selected from the group consisting of hematopoietic cells and inflamed tissue and at least one first subtraction transcript profile from a noninflamed, nonhematopoietic biological sample;
b) subtracting said first subtraction transcript profile from said first target profile to detect a plurality of genes that are differentially expressed in an immunological response; and
c) identifying one of said detected genes that are differentially expressed in an immunological response.

3. The composition of claim 1, wherein each of said second polynucleotide probes is selected by a second method comprising:
a) preparing at least one second target transcript profile from a second biological sample selected from the group consisting of hematopoietic cells and inflamed tissue to detect genes that are abundantly expressed in said second biological sample; and
b) identifying one of said detected genes that are abundantly expressed.

4. The composition of claim 1, wherein each of said third polynucleotide probes is selected by a third method comprising identifying a gene coding for a polypeptide with a known function in immunological responses.

5. An isolated polynucleotide selected from the group consisting of SEQ ID NOs:1-1508, or the complete complement thereof.

6. The polynucleotide of claim 5, wherein said polynucleotide is immobilized on a substrate.

7. The polynucleotide of claim 5, wherein said polynucleotide is a hybridizable element on a microarray.

8. A composition comprising the polynucleotide of claim 5 and a labeling moiety.

9. A method for using a polynucleotide to detect expression of a nucleic acid in a sample comprising:
a) hybridizing the composition of claim 8 to nucleic acids of the sample under conditions to form at least one hybridization complex; and
b) detecting hybridization complex formation, wherein complex formation indicates expression of the nucleic acid in the sample.

10. The method of claim 9 further comprising amplifying the nucleic acids of the sample prior to hybridization.

11. The method of claim 10 wherein complex formation is compared to a standard and is diagnostic of an immunopathological condition.

The application's sequence listing, which the Patent Office published only in electronic form, follows.

SEQUENCE LISTING (1508 sequences)

SEQ ID NO: 1 - DNA, 1350 bp; single-stranded, linear
  immediate source library: U937NOT01
  immediate source clone: 000137
attaaatagaaggttgatagtttatcataaacctgcggggaagaaactcagactttctatttttgatattttgtgcattaatacattacaaacatgaagatgtttggtaaagttttgttttagtcattttctttgcagtcacatcattgtaccaccttcattattgtatagagctgcttcaattctgagtcctctggacttcccctgcctatctgtttgttgttgttgttgaagacagtaaaataagtgttttcaaatctatatgtctcctttttgttggataatgtttcttctttttaatggtaaatattcttgttcttcaacatttttctttggttcttttttccttttttaggaaaaacaaaacaacagacttcatccttaggttttctcaagatttaacgtgaacacatatacacatatcaatttcttaaagaacacaaaatgtttcctccctagcaaaactatttaagagccaattaaactatgaaatagttataaaattatttttaatatttaaggccttgaaattatattccaaggcaaatctaaatgggtgtagttgtatatgcacgatgtaatttaatgntaaagagtacttacagcttgagggaaaagcataaagttttagttaaatagccttcatactgtggatttttcctcctactaactaatatgtgggaaattaagattacagatgctttgggccccctcaaacagtacattgctacagttcactgtagcaacagatttggtggtgatggggggatagaggtagaagcagatagaaggtaattttaaagttaatttattatgaatcattttcccctaatctgcataaatgaattagaactgattttaataaaaatattctgtgtaaaaagtactcagaaaaacatctaaagctgttggagaagagggactcatataaatagttggattgcgttttgctttttatttctttataaaaatatgtcaaaaacagtttttaattttagaaatcttatacttgaaagaaacctcaattatcagtggctttatgaagtaaagttaaaaacaaacataggaaatgtgaaaatatttgtgtttgttttgtctgactaacttgctgctaaatgctatctttaggtgtgtgaaagttctttgatatgttattgtccttttacatcttgttaaatagccattgcttttgagaatcagatagtgtgttgtttagggggttaaattgtgtctataatctttcaaaaaacttttaatattatggattataagaagttacagtagtaccatttttnaatnaggcctgaatgtttccaggccttgaaataaattttgcctaagngaaaaaat

SEQ ID NO: 2 - DNA, 564 bp; single-stranded, linear
  immediate source library: U937NOT01
  immediate source clone: 000197
attgacgaacacgtgacgcggtcgggcggaccactgcagactgagcggtggaccgaattgggaccgctggcttataagcgatcatgtttctccagtattacctcaacgagcagggagatcgagtctatacgctgaagaaatttgaccccgatgggacaaacagacctgctcagcccatcctgctcggttctccccagatgacaaatactctcgacaccgaatcaccatcaagaaacgcttcaaggtgctcatgacccagcaaccgcgccctgtcctctgagggtcccttaaactgatgtcttttctgccacctgttacccctcggagactccgtaaccaaaactcttcggactgtgagccctgaatgcctttttgccagccatactctttgggcatccagtctctcgtggcgattgattatgcttgtgtgaggcaatcatggtggcatcaaccataaagggaacacatttgacttttttttctcatattttaaattactacaagattattaaagataaaatgatttgaaaaaaanaaaaagaanaaaaaaanaaaaaanagaag

SEQ ID NO: 3 - DNA, 194 bp; single-stranded, linear
  immediate source library: U937NOT01
  immediate source clone: 000204
ctctgngccntngaaaatgaatttnntttaccagtaaaagtatgnattttaaaagactttcagatttatgctttttacgtgaagcngctaaactaaaagtaaagcctcaaatcatgtaattaatgggttttnctttttnttntgggggtgggatgggggaggttagttacactttaaaatatntttntncagag

SEQ ID NO: 4 - DNA, 1858 bp; single-stranded, linear
  immediate source library: U937NOT01
  immediate source clone: 000236
gtactaggcttagttatatgaatctttataacacataattactaactttgtagccatatatgtaattgactttgaatgttatttacctgaaattaatcttccttcacacatggaccgtaaacggttcccagttgtctgagagcctcatgagggtttctaggatttatgaccttatgaccagtttttttcatttaccaagattttattttcctacatgaaaatttaattgagtaataattattcacatgtgcattttctttttagctgttaaatgtactatgccatcatccaccatttagtaaaatgtagctggcccagggacatgtaaaaaaaaaaaaanacaacaacantaaatagggcatgtgaaatgttaagttacagcaatagatattttatttgtatttcatgttagtacttttttgttttatatcacttataaaggtacagtgtactctttgtcacagctcagttggtaaccgcattccattgaaaagttggccttgtaaaatacaactctcatttaatattcatgcttttgtgcctttaagaaaatattttttgtcattttttgtgttacagaactataatgtgattcaaggtgtttataggcttgtcataaaagggtcatttctgtgtgttactttctttttatatagctatagtatatttaaacaataatactatcttttataggggtttgtctatttacctattctttactcagacattgatgtagacttgtcagattattctgagtattgttaacagtgccttttcgatggaatcacactttttggctgtcaccttgtgccatatacacacaaaattttgtggaaggcagttttaactttctgaagaatatctgtcaaaatttaagaaaacaaatgtataaaattccattttttccagtgtttagcatttctagtaagcagtgaggttgtttgacatacagtgatgatggcattattgataagccatacatgagactgcagattatattgaatcatattaaatgtacagaaataaaatattagatttatatcaaattttccaaatgttgaaccagtggggaaaatcccacagaaatcagtaagtttacatttcaatttctatcttatttgactaagtggaaagagattctttaaaatgtataacctgccattatgtaatttggtttcattttattctacctgttgtgtgagtttagtatatttaatttactttttgttactctttacatactgtttatttttgttagtttttaattgaagatggactgttgaaattgtataggaccagtgtcttattaatatgattaatatatttagaaggcgccacgtgcaacccatgacaaaatgaatgtgaatattctttctaaaaatttagaaaatgttatctttttgcatttattatgtaaaactgttttacagtatcaaaatttttcacttaaagaaaaaaaatgccatgaaacatttgaactgatgagccacagaacttcagttgaaatttttttcactttttagcatgctaaaatatacatctgagtttaaatgttctgtttaatggccattcataaattcaaagcactaccactggtcagttttgtgtgataaggataaaaatattgttacctgcagtgtaagtacagcacactgtcaaattcttttccttaaggtgcacagtaaatgtacagatagttataggccactgttttgtaatgtagtacatttctaatctattattcctaacctattataactgtttgcagaaagaaaagaatttttctaataatctgtaaaattatgctaacttctacaagtaggcttctaaataaaatttttaaaacgngcaaaanaac

SEQ ID NO: 5 - DNA, 489 bp; single-stranded, linear
  immediate source library: U937NOT01
  immediate source clone: 000367
ttgtgcaaagcataggtaaatatttttctttattaagcttctcactgagaagccctctttattttggtaaatgtcactctgtttgttaggagatgtctgcttttccatgaaatgaaatagtggctaaagccctgaaagaggcaagactacaatgggctgaaacagttggtatagcaaccccagagaagtgcttcattttctttttatagtagaagcaggtccatgtcttttgtggtttcctgcacatctttggagtagttatgacttctcagtttttccccccttaaactgcattgcctattcttttttcctgacatgctatcaggtatcagtgtgttgaatacataatgcttgtgtatcagacttacgttactgtcatcaccattaaaagaattgcagctttgtggccccatgaccntnagctnagtgttgactgtcantcaaggatngcntaaggatacttncaacnnggattagnacntgaagggc

SEQ ID NO: 6 - DNA, 999 bp; single-stranded, linear
  immediate source library: U937NOT01
  immediate source clone: 000496
gacagtggaacaatatctagagtgttaagggaaaataattttgagccaagaattatatactctgccaagttatcatttctttacaaaggaaactggaagacattcttagatatacaggggttaggaaagtatatcaaccaagaactttccctgaaaattttgctgaaggatttactgcagctaacagagaacctgaattaaaataagaatagggaggcaattgtatgaaagaactgatggtatgcattaaaactagttaaggagcattaagtttaaattgttatgtatagggcattaaaactaaatacaaaaatagaaacataagctgggtgtaaaatttcagtttacgtttaaactggaagggcataccacatgttcaatatattgggccaaatactgttttatttttagcatgtagtattgtagatacaaatacgcatgttcttaagctaaacctaagtaaaagggctttgtcactgtagatttgacaaataacattctaaatgtcaaatctgacaattggaaaacagtacagttttatttcccttatttttaagtatagcaggaaaaaaataacaagtttgtccatgttactactgatactgtaaagaaacttccaaatcactggtttgggagggggtggatacatcctcattttctgtacatgatgcatggggaaaaacagtagttactgcatcatatagttccaagtaaatcatatagttccaaagtcaaatttggacatggaaataagtgttaactacaaaaatagaatatatacattccaatgtttggaaaagaagtggtaaaaagaaaaatagcaaaaagacactaaaattagcaaaaagtagattgacagtacagatgacctataaactggttaaatagccctattacaattgaaattgggtcaaaaatcaatctctaacctgagatacatttgtataaaacaaatgatcaaagagtttaaagataatggaaactataaatcatagaaat

SEQ ID NO: 7 - DNA, 1984 bp; single-stranded, linear
  immediate source library: U937NOT01
  immediate source clone: 000513
gccaaatactggaaataaaatatgccagttcaaactagtacttctgggagagtccgctgttggcaaatcaagcctagtgcttcgttttgtgaaaggccaatttcatgaatttcaagagagtaccattggggctgcttttctaacccaaactgtatgtcttgatgacactacagtaaagtttgaaatatgggatacagctggtcaagaacgataccatagcctagcaccaatgtactacagaggagcacaagcagccatagttgtatatgatatcacaaatgaggagtcctttgcaagagcaaaaaattgggttaaagaacttcagaggcaagcaagtcctaacattgtaatagctttatcgggaaacaaggccgacctagcaaataaaagagcagtagatttccaggaagcacagtcctatgcagatgacaatagtttattattcatggagacatccgctaaaacatcaatgaatgtaaatgaaatattcatggcaatagctaaaaaattgccaaagaatgaaccacaaaatccaggagcaaattctgccagaggaagaggagtagaccttaccgaacccacacaaccaaccaggaatcagtgttgtagtaactaaacctctagtttgaactagctggaatagtcttctgcttcctaaatgttaataacaatggaattggagcatttaaccagcccagtatgacttccaaaagaagagacttatgatagagtcaagtttctaatacagaattattttaagtgttttgaacttaatttttaataacatgcatgggtccctctcactaatgtttcaacaatagggaaaaatgagaactatgtggacacttgtttcattggaaggttagggggaataatttctccattcactaggaatatagacaaatgactgtctgggcccacacagttaaccagcccatttctccacactggtacagtagtcacctgtgaaaaaaaaattggaacttactaatttgggcttttcaaaaacattctttgtttagaaggagattctaaagttatttatgatgcttagccatagtattcaggcaaatgttcatttctcctggtacctgtatttaaaatgtacattccacattttaataaattaaccacaagaaaataatcccacatatacaaggtcaggggtggggaagagtattaatggtatcttaattatacccagtctggttttttttttttaaatggggtaaaaatcaaatgcaaccccatcttgttttaggaattttgagaactaataaatgcaccttaatggtcagtgttcctttcaaacatgtgagttctttaacaaaaatgaaataaaccaggtgtctgtggatttctaaattaatcaccgctgggcccattacacaggttttgttgtttggggtggggagggggcttttgttcccttttgacataatatagtcaatgcactaacaattatgtatattcaaacttgattattttaaattcgatcttcagctgtactgtaaagtagggtactgcgattgtagtctccatatctgtattacttttctgtaatatttaagagttgcttaaaagcatacaaaatgtactgttactaaaacagctaattatttctctctccccctttgacaggaaggggcttcagttgttccccccatggctagaaccataataaacaatgtacccgtaatttgtaacataaaagtattgcaatatgttagtaacaatcttgcagccttcctttccaaaggtccattttattttgatcagttcagtatattgcactaattattttaggtattttcattatatgaaagctaccatgtgtcagagatgatttaatctatttaagtgttggactgctaggagaacttgtacatttatgataatgcagaattaggaaaacggttcaccagtgtttagttttatattgaggtgctcaggttggaataaagtggtataaaaagcaaaaaaa

SEQ ID NO: 8 - DNA, 1720 bp; single-stranded, linear
  immediate source library: U937NOT01
  immediate source clone: 000596
agtggcccgtgcgctccatcaaccatgccagcctcatctctgcactctcccgggactatcgcaacctgaagcccagtgctgttgccccacagagaaagatgccactggatgacaccaaactgattatccaccagacactcagcgtcttagaagatattgtggagaatatctcgggggagtccaccaagtctcgacagatttgctaccagtcgctgcaggaatctgttcaggtctccctggccctctttccagcttttatccatcagtcagatgtgactgatgagatgctgagcttcttcctcactctgtttcgaggccttagagtacagatgggtgtgcctttcactgagcaaatcatacagactttcctcaacatgtttaccagagagcagttagccgagagcatcctccacgagggcagcacaggctgccgggtggtggagaagtttctgaagatcctgcaggtggtggtccaggagccaggccaggtgttcaagcccttcctccccagcatcatcgccctgtgcatggagcaagtgtatcccatcattgccgagcgtccctcccctgatgtgaaggccgagctgtttgagctccttttccggacgctccatcacaactggaggtacttcttcaagtccaccgtgctggccagtgtccagagggggatcgctgaggagcagatggagaatgagccccagttcagtgccatcatgcaggctttcggacagtcctttctccagcccgacatccacctttttaaacaaaatctcttctacttggagactctcaacaccaagcagaagctgtaccacaagaagatcttccggactgccatgctgttccagtttgtgaacgtgctgctccaggtcctggtccacaagtcccatgatcttctgcaggaggagattggcatcgccatctacaacatggcctcagtcgactttgatggcttctttgccgccttcctcccagagttcctgaccagctgtgatggtgtggatgccaaccagaaaagtgtgctggggcggaatttcaagatggatcgggacctgccctcattcacccagaatgtgcacaggctggtcaacgacctgcgctactacagactctgcaacgacagcctgccccctggcactgtgaagctctaggcctgctactgcctggggacacggacttctgctgctgccacctggcgccagccctaccttccaccacagatgtctcccagatgggccttggtcacactccttggcttctcccaccgcaagcaacgctgcctgcctctgccgctcctccacatcttgccgctgcccagcagagctgggcttctgggtccacctgagcactggacggtgctcccagggcgttggagcaggcggaggggtgtgtggccaggtactaggaggcaccaggaaatcccgcggggtggcccatgcagaccaggcgcacgtggctcatggggcagaattgccaaggacagctcacgacagtgccaccttctcaccattccagccaaggagagatgtgacgttggaactgctctggcacttctgtcaagcctcccccgccccaattgccttgagatctctgctctttgtcagagatttgcaaagactcacgtttttgttgttttctcatcattccattgtgatactaagaaactaagaagcttaatgaaaagaaataaaatgcctatgttgttgttctagaaaaaaaa

SEQ ID NO: 9 - DNA, 1592 bp; single-stranded, linear
  immediate source library: U937NOT01
  immediate source clone: 000667
gcttgccctagaagttggaagataactgggaccttgaataggtatgttgtcttgggtgacaggtgggaagcctttgaccaacactggagtcctcttgacttggcttttaatttctccataggcctctggaaatgtcagccaagatccgagtaccatttttacgtcaggttgttcccattagtaaaaaggtagcccgggaccctcgctttgatgatctntcaggggaatataatcctgaggtgtttgacaaaacatacccaattnttgaatgncatnccgagcgaaagagaaaagagcttnttgtaaaaacagnttnnangaagnaccctttcaggagaggnagcatttagaaaacttcagcaaacttgtttnnagcgnaatgggngcagccaaaggaaatttcgccattcgtcttccgagcgctactgccagctgatgccgggagctaactaccgcgccggggccggggccggggccggggcccgacgtccccgcggggcccgggaccgcgaggaggatggcgggggccttgagcccgcggccgtggcccgcgacctattgaggggcacatctaacatgtcatttgaggagctgttggaattgcagagccaagtggggactaagacgtacaaacaattggtaggctggaaataagtcctaagaaacaagcttctagaccacctatccaaaatgcatgtgttgcagataagcacaggcctctggaaatgtcagccaagatccgagtaccatttttacgtcaggttgttcccattagtaaaaaggtagcccgggaccctcgctttgatgatctgtcaggggaatataatcctgaggtgtttgacaaaacataccaattcttgaatgacatccgagcgaaagagaaagagcttgtgaaaaaacagttgaagaagcacctttcaggagaggagcatgagaaacttgcagcaactgcttcagcgaatggagcagcaagaaatggcacagccaggaacgaaagcaacagcaggagctgcacctgggccctgaagcaagaacgtcgggctcaggcccagcagggccatcggccatacttcctgaaaaaatctgagcagcgccagttggcactagctgagaagttcaaggagctgaaacgcagcaagaaattggagaacttcttgagtcgaaagaggcgacgaaatgcaggcaaggacaggagacatctccctttgagcaaagagtaataaggaactatcctctgctctgccactgccccagggagacatggatctgtgaggacagatttggccacggctggtttccgttcaagggcaaggatcacagctgcccttgaatctcattgcctcagagaagactagagggctcttggactatccctagggctacacaagaatagttcagccttctgccatgccacacagcctcagcttgaatctggttcattgcgtcctcgtgttcttctctcatccttgccttaaaccagggattctgataccgaagaagaggggccaatgaaaaccatggagtctgttcgtgactcccagggctgggacattatgtaggagccacttcataaacattctctttactcatct

SEQ ID NO: 10 - DNA, 2036 bp; single-stranded, linear
  immediate source library: U937NOT01
  immediate source clone: 000706
cggctcgaggtcnacggctggaganaagccgggagcnagcccaggcggcagtcttnattcccttttggccnncagtttttaggtctgtcantactgcactgcaagaatggcagattttgggatctctnctggccaatttgtgacagtggtctgggatnaggcatccnccattggaggctctggaaaggtcnggtggataaagcttcanagagtaaaccgggncnntgangggcccnnttgtctnntngaaaaaacntcacgcgaggcgtggagtcgacggctggagagaagccgggagcgagcccaggtcggcagtcttgattcccttttggccagcagtttttaggtctgtcagtactgcactgcaagaatggcagattttgggatctctgctggccagtttgtggcagtggtctgggataagtcatccccagtggaggctctgaaaggtctggtggataagcttcaagcgttaaccggcaatgagggccgcgtgtctgtggaaaacatcaagcagctgttgcaatgtttagtcccaggaagcaccactctgcacagtgctgagattttggctgaaatcgcccggatccttcggcctggtggatgtctttttctgaaggagccagtagagacagctgtagataacaatagcaaagtgaagacagcatctaagctgtgttcagcccctgactctttctggtcttgtggaagtgaaagagctgcagcgggagccccctaacccctgaggaagtacagtctgttcgagaacaccttggtcatgaaagtgacaacctgctgtttgttcagatcacaggcaaaaaaccaaactttgaagtgggttcttctagggcagcttaagctttccatcaccaagaagtcttctccttcagtgaaacctgctgtggaccctgctgctgccaagctgtggaccctctcagccaacgatatggaggacgacagcatggatctcattgactcagatgagctgctggatccagaagatttgaagaagccagatccagcttcacctgcgggctgcttcttgtggggaagggaaaaagaggaaggcctgtaagaactgcacctgtggccttgccgaagaactggaaaaagagaagtcaagggaacagatgagctcccaacccaagtcagcttgtggaaactgctacctgggcgatgccttccgctgtgccagctgcccctaccttgggatgccagccttcaaacctggggaaaaggtgcttctgagtgatagcaatcttcatgatgcctaggaggttcctgacatgggacccatctgctcctccagccaactcctgtccctcacatcccaccatggtggctcctcccacctcctctggatttgttcactctgaagaatctgtttgcagagtgggtgcttagcagacagagtgaagctggctggggggcacagtggtgtgtagtgctgctgtgtatcaaaagaccaaggtattatgggacctggtttcagaatgggaatgggtttcttgcacctcatgttaagagaagggagtgtgtcctgaagaagcccttcttctgatgttaaaatgctgaccagaacgctcttgagcccaggcatcgttgagcattaacactctgtgacagagctgcagacccctgccttgagtctcatctcagcaatgctgccaccctcttgtctttcagagttgttagtttactccattctttgtgacacgagtcaagtggctcacaacctcctcagggcaccagaggactcactcactggttgctgtgatgatatccagtgtccctctgcccccttccatccccaaccacatttgactgtagcattgcatctgtgtcctgttgtcatttatgttaaccttcaggtattaaacttgctgcatatcttgacatatcttgagattctgcatgtcttgtaaagagaggggatgtgcatttgtgtgtgatgttggatagtcatccacgctcagtttggcccattggaggaacttagtgtcacgcacaaatggggctattcctacgcttagaat

SEQ ID NO: 11 - DNA, 1689 bp; single-stranded, linear
  immediate source library: U937NOT01
  immediate source clone: 000844
aatttctggctatctttcaaatgttgaatttctggatgctgagagggactttgatttgatatcattaaatccaggacagtcccaagaagtgcttggagtctcggctctgacagcccaagaagggaaataacttgtattaaggaacaactatgagccaggccctgagctgtctcttagataataaaacagatggggagtggaagagtcatttgcttcaagttatacagctaggaaatactcaagccaaatcttgaacgcagctccccctaattctgtggacaggcactttgtaccacacaccatggtccacctaaaaacagaaggataaaaagacttcaggttttcccactgtgtgctgaccatcccaatttatgaatcttcttcaaaatgacatttcacagttatagttagggctcagaaatggcattgaggtagccttatttctcccctttagcagatgctttaagtacacattgctgacttgagcccacccccaggagttaggagaacatttcctttttcatgccatcttccataaataaggtgtttcttggccttcaaagatatagaactttgcagcagtagtaaaagtgaagggtgttctgctctctactcaactttatttgaaaatgtctgcagcttcactcctgtagaaaaggaaatcttcatattttagtaaacttagccgccagtgtactctgtgaggatgtggcaattcaaagtccagtgaatctggactctcttactgattcctggttttagtgtgtgtgtcgggggagtgtgtacctatatataaaggacaagtgtgatatgtgtgtnnnnnnnnnnnnnnnnnnnnnnnnnnnnnnnnnnnnnnnnnatatttgagagctaaggaaaactcaaagcagccccttcattatcttgcgtactacttcaaagatttctgtcagccctaattacaagtgtcaccatatagttggggcttaggtacttgcttacaggaagagcaattccctagcaaaggtcattagctcctaaggcactgagtcaaagtgacagccctgaaggaaattgcactccagccctcctccaggatgtctaataagatgggaaacttggatgcccagccattttggtgacctgagagtctaactactccagttagacctaagggcacaaatgcagaattcatgaccttgtagttgtggcagggtctaggaagtcctctctccccaagtagaaaatattctcttggccattcctgaaattccacattcatataatggctgtgcaatacatgcttctcaataagaaaattaactgcatgtttactgtgtgctgatcacatcagatttttatgtttaaaaaaatctcattatggattgagtccagcccagctctaagagaaaaagaaggcccatatgggagacttcagtctcaattattattgcctttatccagcagtgctttatgaagccccctaccctgtcccattccagaaaccataaggcttnagggaagttctngattctngaggcctgccttggtaaggtnagggtaggtntaattttgancttaggacatcccagaacaggagcnggngggccaagcgaggaaaatgnaacnaagtngggcctttttngnnaatttggnnaaaaaagccngggccatnttggttngattgctttagggcanangtttcttatt

SEQ ID NO: 12 - DNA, 1077 bp; single-stranded, linear
  immediate source library: U937NOT01
  immediate source clone: 001107
cttgtgccccttctgagccatcaggaagtcaaagttcaaacagcagccctcagagcggttggcaacatagtgactggcaccgacgagcagacccaggttgttctcaattgtgatgtcctgtcacacttcccaaatctcttatcacacccaaaagagaagataaataaggaaggcagtgtggttcctttccaacataacagcaggcaaccagcaacaagttcaagctgtaatagatgctggattaattcctatgataattcatcagcttgctaagggggactttggaacacaaaaagaagctgcttgggcaatcagcaacttaacaataagtggcagaaaagatcaggttgagtaccttgtacagcagaatgtaataccaccgttctgtaatttactgtcagtgaaagattctcaagtggttcaggtggttctagatggtctaaaaaacattctgataatggccggtgatgaagcaagcacaatagctgaaataatagaggaatgtggaggtttggagaaaattgaagttttacagcaacatgaaaatgaagacatatataaattagcatttgaaatcatagatcagtatttctctggtgatgatattgatgaagatccctgcctcattcctgaagcaacacaaggaggtacctacaattttgatccaacagccaaccttcaaacaaaagaatttaatttttaaattcagttgagtgcagcatctttcccacattcaatatgaagcaccaccagatggctaccaaatgataagaacaacagcaacaaaaggctccaaaacacacatgcctctttgttttgatgcttctaaagcaagccatgtctcagtcactttgcagttgccaaaagtcactatcacatggactgtaaatgcatatgcatgatttcctaaactgttttagaactctccttaacaatctcaactaccctatttttccctgttccctggtgccacaggctgacaactgcagtctccagtttagaataaatattccatagtggtgacatgtcagctgcccactgatactcctttggaanatggtgcgctgtggatcaaga

SEQ ID NO: 13 - DNA, 1445 bp; single-stranded, linear
  immediate source library: U937NOT01
  immediate source clone: 001168
gcccttctaaatgttgtcctaaaaagtcagcctttagtgccaagagagaacattacagcatggatgaatgcaattggtttgatcatcactgccctaccagagccatattggattgttcttcatgatcgaattgtgagtgtcatcagcagccccagcttgacgtctgaaacagagtgggttggctatccattccggctctttgatttcactgcctgtcatcagtcctactctgagatgagttgtagctatacgttagctcttgcacatgctgtgtggcaccattctagcatcggacaactttctctcattccaaagtttcttactgaagtacttcttcctatagtgaagaccgaattccagttgctttatgtataccatcttgttggaccatttttacaaagatttcagcaagagagaactcgttgtatgatagagattggtgtggcgttttatgacatgctgctgaatgttgaccagtgtagcacccatttaaattacatggatcccatctgtgacttcctctatcacatgaagtatatgtttactggtgacagcgtgaaagagcaagtagagaagattatctgtaacttaaaaccagctttaaaacttcgtcttcgattcatcacacacattagcaagatggagccagctgcagtgcctccacaagccatgaacagtgggtctccagcacctcagtctaatcaggtgcccgtgtctttaccagtaactcagtgaagccagactgtactgtggagaaagtagaaatatatccgtctttgagagtggactcaaaccttttaaatctgaatgcgatcacactgtagtgatatagtagaagcagtgatgatattcagattgttttattttgattcaaatgatgaatctgttgacaccttataactcccatctccctatctatatttttgtctctaagagatcaagtaagatacatgttgttcatattcataacaacttattagagctatgtaggaacatagaggtatctgtgatcaaatgacttgtcattgggcactttcagtctttcctattctagccgttgtttttgtttgtattttttattattaatgacatatttagtcttcagatatattattttaaaggcaccacacatgtaaaacagttattacaaatattttatacataaatctcttggtagattttcagaataatagaggtttatatcaagaaaaggaatctagattttgttgcattgtaggagcaaacaaggcttcatattctttttaaaatgacttgaaattttattataaatttccatagtttctatcaaggtcaactggcagttttattacctttgctatggcacttgaacttactgtataaaattagttggaagccatgtaagaaaataacatctgaaaattcttgaacttaaaatcatgcttaaatggttgattctccaattt

SEQ ID NO: 14 - DNA, 1775 bp; single-stranded, linear
  immediate source library: U937NOT01
  immediate source clone: 001273
ctcgacgctcctggttgccattncctgcntgattnacgtntnagggggaagctggaaggcgtcgttntcctttcccagctctcctgcctgtccgcnatnttttcaggccgggtctggcttggtcttcccccgtaaaggaaatggccggggagctccaggggatccaggcgccgtcgcttcggcggagctgggctgaccagccaggacagcggggtaaacccgaacaattctgcgcgaggtagggaggccatggcgtccggncagtaactggctctccggggtgaatgtcgtgctggtgatggcctacgggagcctggtgtttgtactgctatttatttttgtgaagaggcaaatcatgcgctttgcaatgaaatctcgaaggggacctcatgtccctgtgggacacaatgcccccaaggacttgaaagaggagattgatattcgactctccagggttcaggataccaagtatgagccccagctccttgcagatgatgatgctagactactacaactggaaacccagggaaatcaatggttgctacaactatctgtataggatgaaagctctggatgccattcgtacctctgagatcccatttcattctgaaggccggcatccccgttcctttaatgggcaagaatttccgctcctacctgctggatctgcgaaacactaagtacgcctttcaagggtgtatgcaaagcactcattgatacccttttggatggctatgaaacagcccgctatgggacaggggtctttggccagaatgagtacctacgctatcaggaggccctgcagtgagctggccactgcggttaaagcacgaattgggagctctccagcgaccatccaccagtcagcagccaaagacctaactcagtcccctgaggtctccccaacaaccatccaggtgacatacctcccctccagtcagaagagtaaacgtgcccnagcacttccttgaattgaagagctttaaggataactataacacattggagagtactctgtgacggagctgaaggactcttgccgtagattaagccagtcagttgcaatgtgcaagacaggctgcttgccgggccgccctcgggaacatctggcccagcaaggccagactggtatccatccaagttcccgttgtatccagagttcttagagcttgtgtctaaagggtaattccccaaccctttcctttatgagcatttttagaacattggctaagactattttcccccagtagcgcttttttctggatttgcattcaggtgttattcttaatgtttctgtcaaagcttcttaaaaatcttcacttggtttcagccatagttcaccttccctgttccaggtttatttaattccaaaggtgagagttggagtgagatgtcttccatatctatacctttgtgcacagttgaatgggaactgtttgggtttagggcatcttagagttgattgatggaaaaagcagacaggaactggtgggaggtcaagtggggaagttggtgaatgtggaataaccttacctttgtgctccacttaaaccagatgtgttgcagctttcctgacatgcaaggatctactttaattccacactctcattaataaattgaataaaagggaatgttttggcacctgatataatctgccaggctatgtgacagtaggaaggaatggtttcccctaacaagcccaatgcactggtctgactttataaattatttaataaaatgaactattatcaaataaaacgtatgaatcagtcctt

SEQ ID NO: 15 - DNA, 504 bp; single-stranded, linear
  immediate source library: U937NOT01
  immediate source clone: 001454
ctgcgccattctgtgcaatcccagtgaccaaatcccttccttgcccacctctatgtcagcaggactgaccacatcactcccccgagttcccaccaccagcatttcctccaacctttttccatcacaaccagttagaaccctacaggcaacaaggccttctagaatccgcttaacccttgggttgttaacaggcaaatttcagtctgctacactttgttaggtccagaaggaggctgcccatactactttcttatgagcatgctcagtatggcatatggacatgtaatgtcacatctttgtggagtgtgattttcttttttcacatatttgtatgcagtagagagcctgttgtagaaaacgctccctgtatcttgctgtactgttaaagaaagctgaattccacattgccaacaaaagcgtgaaaatgttccatgaaccttcctcccagggaaagccattcaaagcctgattattttttctaaggaacttcaattaaattgaagg

SEQ ID NO: 16 - DNA, 1264 bp; single-stranded, linear
  immediate source library: U937NOT01
  immediate source clone: 001697
tttgtgttgaaaaaagataaaaagaaagaagagaaagaagatgaaatttcattagaagatctaattgagagagagcgttctgccctaggtccaaatgttaccaaaatcactctagaatcttttcttgcctggaagaaaaggtaaagacaagaaaagattgataaacttgaacaagatatggaaagaaggaaagctgacttcaaagcagggaaagcactagtgatcagtggtcgtgaagtgtttgaatttcgtcctgaactggtcannnnnnnnnnnnnnnnnnnnnnnnnnacccgctacacccagggaacaggtggtgatgaggttgatgattcagtgagtgtaaatgacatagatttaagcctgtacatcccaagagatgtagatgaaacaggtattactgtagccagtcttgaaagattcagcacatatacttcagataaagatgaaaacaaattaagtgaagcttctggaggtagggctgaaaatggtgaaagaagtgacttggaagaggacaacgagagggagggaacggaaaatggagccattgatgctgttcctgttgatgaaaatcttttcactggagaggatttggatgaactagaagaagaattaaatacacttgatttagaagaatgacaccaaacacatcgctgaaaaaattaagtcagctcagcacgagttgaaattgactacattaatttctttccacctagaatcaacaggatgtttatttcctatgctgattctggaggagttaacctcctgcaaaaaaggcatcttgtccctacatcttctcttctgactttggctacatctcatagtaagttcagagtagttcatgataaattgaaaatataatggtcattgcagaaaatgattgatgttgtaactgtccacccaagtaagaagtgtatctgcctttccatcttttggttttcatttgggcatgtgctattaccagaaacaacaaacttatatttaaaatacccttcatttgacacagtttttaatgagtgatttaatttcctctgtatttgtatgtttagaagactgcctaaaacatgagcactgtacttcataaaggaaactgcgtatgcagattcagtattgtgtatctttggacaattagatggacatttaaaatggaacttcttttatctgacaggatcagctacaatgccctgtgttaaattgtttaaaagtttcccttttcttttttgccaataaagttgtaaataaagaccatcatacattaaaatcc

SEQ ID NO: 17 - DNA, 1323 bp; single-stranded, linear
  immediate source library: U937NOT01
  immediate source clone: 002030
ccaaacctggaaaaaataaaagaactgcaatcactactccaaactttaagaagcttcatgaagctcattttaaggaaatggagtccattgatcaatatattgagagaaaaaagaaacattttgaagaacacaattccatgaatgaactgaagcagcagcccatcaataagggaggggtcaggactccagtacctccaagaggaagactctctgtggcttctactcccatcagccaacgacgctcgcaaggccggtcttgtggccctgcaagtcagagtaccttgggtctgaaggggtcactcaagcgctctgctatctctgcagctaaaacgggtgtcaggttttcagctgctactaaagataatgagcataagcgttcactgaccaagactccagccagaaagtctgcaactatgaaccacacaaaggaaagctaaaaccatgggggcaatctaaagaaaataattatctaaatcaacatgtcaacagaattaacttctacaagaaaacttacaaacaaccccatctccagacaaaggaagagcaacggaagaaacgcgagcaagaacgaaaggagaagaaagcaaaggttttgggaatgcgaaggggcctcattttggctgaagattaataattttttaacatcttgtaaatattcctgtattctcaacttttttccttttgtaaatttttttttttttgctgtcatccccactttagtcacgagatctttttctgctaactgttcatagtctgtgtagtgtccatgggttcttcatgtgctatgatctctgaaaagacgttatcaccttaaagctcaaattctttgggatggtttttacttaaggccattaacaattcaggtttctaacggggcccatcctaaaattctgtttctagatttttaatgtcaagttcccaagttccccctgctggttctaatattaacagaactgcagtcttctgctagccaatagcatttacctgatggcagctagttatgcaagcttcaggagaatttgaacaataacaagaatagggtaagctgggatagaaaggccacctcttcactctctatagaatatagtaacctttatgaaacggggccatatagtttggttatgacatcaatattttacctaggtgaaattgtttaggcttatgtaccttcgttcaaatatcctcatgtaattgccatctgtcactcactatattcacaaaaataaaactctacaactcattctaacattgcttacttaaaagctacatagccctatcgaaatgcgaggattaatgctttaatgcttttagagacagggttcg

SEQ ID NO: 18 - DNA, 913 bp; single-stranded, linear
  immediate source library: U937NOT01
  immediate source clone: 002158
cagggccaccacgcggagaagctgccagcaggagcaggagcccccaaggccggcctggaggaagctccagctgtcaccgcgggactgaaaatctttgaaccaccagctccaggagaaggcaactccagtcagaacagcagaaataagcgtgccgttcagggtccagaagaaacaggatcttacacatttgttccatggcttctcagctttaaaaggggaagtgccctagaagaaaaagagaataaaatattggtcaaagaaactggttacttttttatatatggtcaagttttatatactgataagnnctacggcatggggacatctaattcagaggaagaaggtccatgtctttggggatgaattgagtctggtgactttgtttcgatgtattcaaaatatgcctgaaacactacccaataattcctgctattcagctggcattgcaaaactggaagaaggagatgaactccaacttgcaataccaagagaaaatgcacaaatatcactggatggagatgtcacattttttgggtgcattgaaactgctggtgacttacttacaccatgtctgtagctattttcctccctttctctgtacctctaagaagaaagaatctaactgnnnnnnnnnnnnnnnnnnnnnnnnnnnnnnnnnnngtagttaccattgccttttctgtgagctatttgttttggtttgctgaaactagtccaaaacaggaaatttaacagacagccacagccaaagagtgtcatgtgaattacaagaaatagagcccatttagggaaagatagaactagaaaggcttttcattataattccatgttgaacaattgagtcatagcttcttatcttggaggaaggacacaattcaaaggggcagtaaggattttgtaaaacgtggcatcc

SEQ ID NO: 19 - DNA, 1232 bp; single-stranded, linear
  immediate source library: U937NOT01
  immediate source clone: 002481
ccggtggaacgggtagcttggccaggttgtgaggaaccgcagcgcgccgcaggaccggnccgctgagcctgcagccgccccgcgccgtgacctgcgaccctagaccccgactccctttggctcagcccgcgcgccccaggcccggcccgggcggcgcgacgggaggatgagcggcgggcggcggaaggaggagccgcctcagccgcagctggccaacggggccctcaaagtctccgtctggagtaaggtgctgcggagcgacgcggcctgggaggataaggatgaatttttagatgtgatctactggttccgacagatcattgctgtggtcctgggtgtcatttggggagttttgccattacgagggttcttgggaatagcaggattctgcctgatcaatgcaggagtcctgtacctctacttcagcaattacctacagattgatgaggaagaatatggtggcacgtgggagctcacgaaggaagggtttatgacctcttttgccttgttcatggtcatttggatcatcttttacactgccatccattatgactgatggtgtacagctcccaagtgctccctatccagtccaaaggaccctcttgattacagcacaggaacttgatcgttggggaaccccagccccttggaacttggaagacccgtgtttcctggaccgcgaatcagtgtgttgggcatcagtgttttctgcaagggttgtgacctgaaactttttaaaaaccacccacctttggggaagcatttctgaatttatccatcaccaaccatttcttcttggataccatcaagtaacagctattatttgccaagtggagctgtcatttaatttgatgcacctctggattcagatgaaacattaaattgtcttcctcgattctccatcgggtgtagagtttttaaactatcaatggcatttcaagtcttctgaaacagcatggctgtatgtgcgtggtccatagcacagtacatgcagcatctaataagagtttccattgtagaatgttttcacatacttgaataaatcaaatctttaattgagaacctgttgatgatacctgataaagcctttcccaccccacctgtagcttgggaaccagtagaagcactgnagggggtgcctcccaccccatccctctttcttcctctccctgatcccttagcggatccagcagacctctttctgtttatggaggcagcagggaaatcaaggg

SEQ ID NO: 20 - DNA, 1621 bp; single-stranded, linear
  immediate source library: HMC1NOT01
  immediate source clone: 002501
ggcacatgtatcgaatttacggattacagttattgatggaggacacatggaagaggattcgtttcccagacatactacgagtcttttggctaacaagagttacagctcaggctacagtgttaatgtacatcttaaggatggcaaatgaaactgattccttctttatttcttgggatgatttttgggacctcatttgcaatcttataattagtgggtgcgattctacaccgggctaagaccagaagagagacttattcgcttaagtagaaacatgtgccttttattaactgcagtcctgcattttatccatggaatgacagaccctgtattaatgtctctcagtgcctctcatgtgtcatcttttcgtagacattttcctgtgctgtttgtctctgcttgcctgtttattcttcctgtcttactcagttatgttctttggcatcactatgcactaaatacatggttgtttgcagttacagcattttgtgtggaactgtgcttaaaagtaattgtttctctcactgtttatacgttattcatgattgatggctactataatgtcctctgggaaaagcttgacgattatgtctactacgttcgttcaacaggcagtattattgaatttatatttggagttgtaatgtttggaaatggggcttacactatgatgtttgagtcgggaagtaaaattcgggcttttatgatgtgcctacatgcatattttaacatctacttacaagccaaaaatggctggaagacatttatgaatcgtaggactgctgtgaagaaaattaattcacttcctgaaataaaagggagccgcttacaagaaataaatgatgtatgtgcaatctgctatcatgagtttacaacatctgctcgtattacaccgtgtaatcattatttccatgcactttgccttcggaaatggctgtacattcaagatacttgtccaatgtgccatcagaaagtatacatcgaagatgatatcaaggataattcaaatgtatctaacaacaatggatttattccacccaatgaaactccagaggaagctgtaagagaagctgctgctgaatctgacagggaattgaacgaagatgacagtacagattgtgatgatgatgttcaaagagaaagaaatggagtgattcagcacacaggcgcacagctgaagaatttaatgatgatactgactgatgaaaatagcatttattaatgattgaggtatttgtttaaaattcagttcatccaaaatggagtaatatccttcaccttcagtgtgtaaccaagcacaaaaacagtatcaatgttgaatctgtgaatggttttccgtttactgtgatgtgctactgtaaatatacctctttaattacttctggtctctttggtgacctgtttaaatttgtgtacattattgtacatagaataaaatgttttcacatttttatgacaaaatttgaacaaatagctttttaatagatgtaatgatcatatggtgcgtcacctgtgccaaatattcttcaatgaaattatataatgtaactttggacctcagtttttctttagaaatgggtgggagaatgaaaatgcaaatcaggaaaccacattaaagtcaagg

SEQ ID NO: 21 - DNA, 1141 bp; single-stranded, linear
  immediate source library: HMC1NOT01
  immediate source clone: 002523
atttatatgtaaatgtcattgaagacaaaggtcaaatatttgtctgtttgtagatcacaggcaccagttggtcttcagggacctcatagcccctcggtggtgccttctcaaggcagtgttcctggaggctcccatcagggtcagcccatgcacctgccctgggtgaggaagtagcattgctgctggatgagaaacgnctgcgntgctctgttagactggtgctgaaacaaaaggttaagactaggttgaagtctagatgaaagaaatctgantcatgtcattcataaccccttgatctgtagtgtcatgggtactnccgcagaagnnagttagcttggggnaaccncaaacttccaatncaaacccngnttaacccaaaangttcccanntttaaangttnnntaaaanttcctaanccctaanccaaaangggtgtnnanttnggnaanaagccattntaaanntcanggtgaaaacnaanttataaaaatttccggattaaacctagggcccatggggattactttcgacanccgggggcttgtcaaaggcgtggaacccccaaccccagccgggcgctgaacaatgtaaaaagaatttgcnctgcaaccctnnnnnnnnnnnnnnnnnnnnnnncccagcggccatttaatgcagccaagtgcaattcctttccccaccttagaaagcaccaccagataatacagcagaactgatcctgcagaaaggttgctggagggtcaggccgtggtcgtaactaacaccacattcccattttgtttgctggataattttttaataaagtgaggtttacatcactgatatttaagaatggctatatgcacaaaagaaaacacacctttttggttaaggggtgaggaagttagagaaagcatgagaaacagggagcatgtggggtgaggcggggcaggagtggaaggctgcaggcacccccagctcactccctgcctgcggcagcacccatgacactacagatcaaggggttatgaatgacatggattcagatttctttcattctagacttcaacctagccttaaccttttgtttcagcaccagtctaacagaggcanccgnagggtgtttctcatccagcagcaatnctacttcctcacccagta

SEQ ID NO: 22 - DNA, 1640 bp; single-stranded, linear
  immediate source library: HMC1NOT01
  immediate source clone: 002664
gaaggaacaaacagggtcaaagactctaaatggaggatctgatgctcaagatggtaatcagccacaacataacggggagagcaatgaagacagcaaagacaaccatgaagccagcacgaagaaaaagccatccagtgaagagagagagactgaaatatctctgaaggattctacactagataactaggttgacatacctggaatatagagaacacttgagaagtttgtaatggttttcatttgaaatagactgctgaaagttttaaatttttataagcataggtttgatgttgaaaacttgttttgagggagaaaatccctttgttttaaagtaaagtaaacattatcgctaagtgtacttgtgcagtattaacagctacattatacagtaaatgtgggataaaatccatttagaaaatgttaaactgcttttccagacatggttgtagcatattttcaattagtgtgtgtatgttaatgtgtaattgatagtagaacaaagttacatttttaaaactgctacttgtataaaaccttgcctcttttcccaaatactgtgggttttgtgcatagtttttacaaaccttggatttaccagactgtcttttcactgtttgtgggttttgtagaagttacacatttttatggtagataaaatgttacttctatacaagtactcactccctttttatcaaaagttaattttaatctcacagtctacattgtgctacattatccagcttctttggaacaatgtgtgctctgtatggttttttttggtatgacaactaattaagcaactgacattgaactgagaattctacaaactataaaacattaatttttgaaggtaatttagttttgtggctgggcattcagtgaagtcttaggacttctttgcagacaactgactgggtatatataggaatgaatctggctttagggttaaatcatttaaggtccttttataggcaggcactagtaactaaaactgaaaactaagtaagtttatttttgaggaatgttgttaaaaatgtctttaggaagtcactaaaacttaattggaagaaaaaatcatgatgcttatacaataaatatgaataaatgttatataaggaaactcacctatttgaaatcatggctatattgtttttattttctagattccaaaaatacaaacactagttgttccagcattgtactttgataagtctgtacattgacgtgtatggactaaatccagggtaaaatcaatgttacaaaatttaagggtatgttaactaaaggatagcatttctaagatattttgaatattagggtcatttggcacttctcagcaagtaggatacttctcatgttttgaaattatatgaatatggaaaaaaatggcttaagaccagcgtctctgtatgacattgtgtggttgaccctctgagataactgttttcatctacagaattgcatttttgcttttaaagaggtcttataatggaactaggaatcaccgttttgagagaacctgcatatataccagtcattatctgtttggtccttatacagttttaacttacttagatttattctagttaagccataagttcaacgtgtaaacttgttttcattaaagaatttttctatca

SEQ ID NO: 23 - DNA, 833 bp; single-stranded, linear
  immediate source library: HMC1NOT01
  immediate source clone: 002682
cgtgttccttaagagggagtatacgtttcctcgccatttatccaatggagtttcctcttacctacttaacaggaacagggaaagggtgtcccccaacggtacggctgccccgcctcttcctgggggcccacacgtgttacaggaagtgggtaagggtaatatggaggagcttccggcagcccccggcggctgaaagcgggggcagaagtgctggtctcggtcgggattccgggcttggtcccaccgaggcggcgactgcggtaggagggaagaggttttggacgcgctggcctcccgccgctgtgcattgcagcattatttcagttcaaaatgaactatatgcctggcaccgccagcctcatcgaggacattgacaaaaagcacttggttctgcttcgagatggaaggacacttataggctttttaagaagcattgatcaatttgcaaacttagtgctacatcagactgtggagcgtattcatgtgggcaaaaaaatacggtgatattcctcgagggatttttgtggtcagaggagaaaatgtggtcctactaggagaacaaagggtggaacagcagaccaagctngaagcagagangttgaaagtgcaggccctnanggacccgaggtctttccattcctngagcaggntactcttnngngagtactaatctttngcccangancctttttggctcttnaaggngtatgnggctgtcacntgangtgaanntgggcatcctnggcacctgacggagtttngtcacaanacctttagnngtnttgaaaangtcaccttttnttttngggtnangttccaaaatcaacaatgag

SEQ ID NO: 24 - DNA, 413 bp; single-stranded, linear
  immediate source library: HMC1NOT01
  immediate source clone: 002783
caaatttccatgtattttctgccatttttcagggtctaagattggtcatacattcccaatttactctcagttccagtcaagctggttgctctgaaagtaacccagcttgttgctctaaaatacctcagtagcctgagtgttatactagagatctaaagggttaacaggatagggtggaaaggttagagactcctagaaatctctggtcaccgtgaatcttcggcctcattctaatacctgttctttgggacagtctttttcctttggtgctctcttgcctttagctaccttctctaatatgtatgctaccatcactaataaagtgatgggaatgggtttgagagtcgtaatttatattaaaaaagttgttggacttttaaatacattttttcaaataaaaaattaagcaaaat

SEQ ID NO: 25 - DNA, 2538 bp; single-stranded, linear
  immediate source library: HMC1NOT01
  immediate source clone: 002832
gtcttgaatcatatattaagaagtaaaaataatagtgatcaggcagaaaagaaaaatggaacatntaaaaatgtatgtgctaactatatcatccagtgtgcagtgttgtgtatttttctaagcatgacaacattgatgtgccttttcagtgtaacagcaaatactgttagtgaacattgtcaatttatgtcattttgttaagagatatgactggagtgtgcagtgtggaatgtctctaatactacttgagaatcctgcagttctataatcataaacaaaaattacttagtttcgttaagctaagattgtgtttgtgttaacttcgacatcaaggagcaaagaactttagaacagactcctcaatcttgtgactttcttattctctaggaaagtaacacttcgtttcatgaagcttttctgtggggcttcgattatttcaagtctggtttctaagtgcagtgtgtttgaagcaaacgaacttccaactcacttatttggcattgggcaacttggccaagtctgccactttggaagatggctctggaggaaactctcatatggctaaaaaggcaggctagtttcttacttctacaggggtagagccttaaaaaagaacgtgctacaaattggttctctttgagggtttctggttctccctgcccccaataccatatactttactgcaattttatttttgcctttacggctctgtgtctttctgcaagaaggcctggcaaaggtatgcctgctgttggtccctcgggataagataaaatataaataaaaccttcagaactgttttggagcaaaagatagcttgtacttggggaaaaaaattctaagttcttttatatgactaatattcttggttagcaagactggaaagaggtgtttttttaaaatgtacataccagaacaaagaacatacagctctctgaacatttattttttgaacagaggtggtttttatgtttggacctggtaatacagatacaaaaactttaatgaggtagcaatgaatattcaactgtttgactgctaagtgtatctgtccatattttagcaagtttacttaataaatcttctgaaccatgttttgtgcctgtttgnattcctttataanccaaatgttgttggaataaaanacatgagtnatcattgtgaagtgagtctgagttgtttacactgatgccttccctgcccaccacaaattgtgtacatagtcttcagatgataccacccctttccccagctcccaaccaagagctggttctaggcctgtgttatatgtcatatttagcgtttttatatatgacctttgatttctgttgtttgtattttagcacagtgtatgcaccttcatttaaatacatctgtgtgcatacagatacgcatatatgtgtgtgcgtatgcatatatctctcatctgtagtttccaagagttcagctgaagcagatggagtcctgcagcccaggagacaccctgcatccctgctaatagtgtttgccacaagtattagtgagtcttccttattaatattttcatttcagaagactgaagcaaagctgatagtgtttgctgtttctttggcagctaagtgagggtcttgggatgacttgctgtgttcctcaagctgcactttggggccatctctgcagtattagccccctttttgcttggtggtactctgtctgtgcctaagtgtgtgtgtgatagtcactcttgcatggcttccatgtctggtttgtggcatttggggataaggtgctgaagccagagcatttgcagtttgtttgaggcctcgttgccaatgatagatcactactgttgacctggtatgtctgcttgcttgctgcttttccttgctttctcttggaagaggaaaggactctggtcaggcccaggctgagtgagatgagctgcagctggctcatggccttcttagagcagagagaggagtatgtcattttactaaggtcctaaacaaacatttatgcaggcaacactccttgcagatccagaaactgaggcacaatagggttatgacttgctcaagaatatgtagctgctagggggtaaatcaaggcatcacaatttctgttcagcgggcaggaataggctgtgaattgctagcactttttttttttaagcaattactttttgacttgttcctctgaaagtgcaagaggcgtacaacttttcccaaatgtagactagaatctgcaggatgccacccactgtatagttctgctttcccagagaggaagaacttttagaaaccaaatgatcttaattgttattgcccacccctggcttttccgggtagaaaattcacagtaggaatgattgttaagagagagtgcttggaaccatgggttaacaggaaaggctacctaacttcacatatctgcaaccagagcagccaccaagcattacttagcagcaggaaaatgattgtatttgagttcctgtgtgtccaaaactgaggcaccatgttctttgaaaacatgccacctcaaggctgggcgcggtggttc

SEQ ID NO: 26 - DNA, 2281 bp; single-stranded, linear
  immediate source library: HMC1NOT01
  immediate source clone: 003095
cggctgtcgcccgtgtcccgccggcccgttccgtgtcgccccgcagtgctgcggccgccgcggcaccatggctgtgtttgtcgtgctcctggngttggtggcgggtgttttggggaacgagtttagtatattaaaatcaccagggtctgttgttttccgaaatggaaattggcctataccaggagagcggatcccagacgtggctgcattgtccatgggcttctctgtgaaagaagacctttcttggccaggactcgcagtgggtaacctgtttcatcgtcctcgggctaccgtcatggtgatggtgaagggagtgaacaaactggctctacccccaggcagtgtcatttcgtaccctttggagaatgcagttccttttagtcttgacagtgttgcaaattccattcactccttattttctgaggaaactcctgttgttttgcagttggctcccagtgaggaaagagtgtatatggtagggaaggcaaactcagtgtttgaagacctttcagtcaccttgcgccagctccgtaatcgcctgtttcaagaaaactctgttctcagttcactccccctcaattctctgagtaggaacaatgaagttgacctgctctttctttctgaactgcaagtgctacatgatatttcaagcttgctgtctcgtcataagcatctagccaaggatcattctcctggatttatattcactggagctggcaggtttggatgaaattgggaagcgttatggggaagactctgaacaattcagagatgcttctaagatccttgttgacgctctgcaaaagtttgcagatgacatgtacagtctttatggtgggaatgcagtggtagagttagtcaactgtcaagtccatttgacacctccctcattaggaagacaaggactatccttgaggcaaaacaagcgaagaacccagcaagtccctataaccttgcatataagtataattttgaatattccgtggttttcaacatggtactttggataatgatcgccttggccttggctgtgattatcacctcttacaatatttggaacatggatcctggatatgatagcatcatttataggatgacaaaccagaagattcgaatggattgaatgttacctgtgccaacaattagaaaagagggttggaaattggctgttttgttaaaatatatcttttagtgtgctttaaagtagatagtatactttacatttataaaaaaaaatcaaattttgttctttattttgtgtgtgcctgtgatgtttttctagagtgaattatagtattgacgtgaatcccactgtggtatagattccataatatgcttgaatattatgatatagccatttaataacattgatttcattctgtttaatggaatttgggaaatatgcactgaaagaaatgtaaaacatttaggactagctcgtgttatgggaaaaaagtgcactgaatttattagacaaacttacgaatgcttaacttctttacacagcataggtgaaaatcatatttgggctattgtatactatgaacaatttgtaaatgtcttaatttgatgtaaataactctgaaacaagagaaaaggtttttaacttagagtagccctaaaatatggatgtgcttatataatcgcttagttttggaacctgtatctgagtaacagaggacagctgttttttaaccctctttctgcaagttttgttgacctacaatgggctaatatggatactaaaaatactacattgatctaagaagaaactagccttgtggagtatatagatgcttttcattatacacacaaaaatccctgagggacattttgaggcatgaatataaaacatttttatttcagtaacttttccccctgtgtaagttactatggtttgtggtacaacttcattctatagaatattaagtggaagtgggtgaattctactttttatgttggagtggaccaatgtctatcaagagtgacaaataaagttaatgatgattccaaaaaatactacattgatctaagaagaaactagccttgtggagtatatagatgcttttcattatacacacaaaaatccctgagggacattttgaggcatgaatataaaacatttttatttcagtaacttttccccctgtgtaagttactatggtttgtggtacaacttcattctatagaatattaagtggaagtgggtgaattctactttttatgttggagtggaccaatgtctatcaagagtgacaaataaagttaatgatgattccaa

SEQ ID NO: 27 - DNA, 2570 bp; single-stranded, linear
  immediate source library: HMC1NOT01
  immediate source clone: 003104
gcagaggaaggaaccagaaatgttgttgctgaatgtctaggaaaactcactctaattgatccagaaactctccttccacggcttaaggggtacttgatatcaggctcatcatatgcccgaagctcagtggttacggctgtgaaatttacaatttctgaccatccacaacctattgatccactgttaaagaactgcataggtgatttcctaaaaactttggaagacccagatttgaatgtgagaagagtagccttggtcacatttaattcagcagcacataacaagccatcattaataagggatctattggatactgttcttccacatctttacaatgaaacaaaagttagaaaggagcttataagagaggtagaaatgggtccatttaaacatacggttgatgatggtctggatattagaaaggcagcatttgagtgtatgtacacacttctagacagttgtcttgatagacttgatatctttgaatttctaaatcatgttgaagatggtttgaaggaccattatgatattaagatgctgacatttttaatgttggtgagactgtctaccctttgtccaagtgcagtactgcagaggttggaccgacttgttgagccattacgtgcaacatgtacaactaaggtaaaggcaaactcagtaaagcaggagtttgaaaaacaagatgaattaaagcgatctgccatgagagcagtagcagcactgctaaccattccagaagcagagaagagtccactgatgagtgaattccagtcacagatcagttctaaccctgagctggcggctatctttgaaagtatccagaaagattcatcatctactaacttggaatcaatggacacttagttagatgtttgttcaccatggggaccattacatatgaccatacaatgcacttgaattgacaggttaatccataagacatggaaagagaagtgtctaaaagcttcaaaatgttccacttttttttccttcatggagactgtttgtttgggctttcttccattgttgtttttgtagcatttatttcagaaatgtgtatttccataatccagaggttgtaaaaccactagtgttttagtggttacagcaacatttgaaatggaaactaaaagttaggattttatggagtatggagatagggtccagtatctatttaccctgtaatgtttaggattaaaatgttaaaattttgtgaccatgaatttctttcttttataaattttctcatttaaaaatcaaaaatcttgcaaaacaaaaaccatgtttctttttcttgtataactttttgttttcagcaacataaattgatttttagctggcagacaagaatatccatataagatttgttaaccatttcagagagtttggcaatttttaaaagataataaggtatcatttttaagtatgaaaattaacaatatccctgttgcgcacactaattttgcatgagtaagtttacaaatatgtatcgtctgtaaagcagcatgtgcagattattcataatatagaagttaaaataagtattagtgcaattttcagatatttatttttgcacagaaaacacattatctggagagaaagaaaggagaatttttgagacttgggttttcttaatgccagtgtgaatttgcagatgttttcagaaaatcaagtcacagtaacaatttgccacttttttctgttataaatcttcttacttaaattttgaatatttagtttttctcagttacccatttgtgtgtgtgtgattccacttagaaattcttaaaaccagatttttctttcattccgtttggatgtctacattccttatcaaaggatataaatactgtgtatgcttttgaattttatttttagggaaaattctgaagccagctatcacaggtttgttagctaataatagtattttcttttagttgagttaggtttttccccatctcctgtagagcgaatttacatattgtattgggtaagtgttcactacttttcctgattaagggatctgtgctggggaacaaagcttttgcagtaccttatattgtagttaacaattttattttaacatatccttcagtgagctcatttcacactgtagcctcttccttaaaatttgtggtgctcctgtaacagtaagaactaattctgaaataaaagacatctcctaatgctgtgcaaacatagtttacatgtattgaaggaggcagttgttaaattgagtgaccaatttaagcaatcagatatttgaaaactgcaccctttagttttgaaactgtgaattagaaacacttttcctgctgtattactacctgctttaacatccaaatatacagtgattttaaatgataacatactgtggttattagattancagcttgattttgaatgttcagatgataatgcagaagacatcacttctagtaaggattttgactagtgcattgatgttgaagttggtgccatttcaaaatgtggcaggtgataatcttttaccataatttgcataaaactgtaatagaagtttattttgagatgttagtatattatgtact

SEQ ID NO: 28 - DNA, 783 bp; single-stranded, linear
  immediate source library: HMC1NOT01
  immediate source clone: 003107
ctgaaggaagccatacctctgggcagagtaacgggcgagaccaccaagcactggccaaggcggtccaggttcaccaagacactctgcgcaccatgtactttgcttgacatgttttagtgtttagcgattgtgtaccgagtgggattcacgagaccagctacactcagaccaacagatggccagcccttccgtgacagccagcatcgaacatgagacgtcattgattttattagattctccgttttccagaatgccttccgtcccagatttcaaacttggattttgaactgcagacctgtatgagaacccaatgtcataggaaatatggtttgctaaaatctataagctgcttattaaaacagagtcccgtgtgtcctaaaaatctcctaaaaccagtctatgaactcagggctttaaaacatttttaatttatttggtcattcaatttacttgtttttaatacatgattctctatgaaattgatgggctcaaactagctgtgaatcttctgagagtgaaagcaacacaaaacacaagtgtggttttaaagccttgaacattctgattgttgtcactaaagttgatttccaggcgattgctccgtgtgcccctggcgtggctcacccaagttcctcgactgagggccggtggccatgcagaggcgtccgcaggtgcccgtgnttctggcaagaaccgcctttatcccggcctgaactaaggtgcagttgaagaaggtggnccgtgtgnttaaagattccagggcnaagaggttggaancaaagg

SEQ ID NO: 29 - DNA, 648 bp; single-stranded, linear
  immediate source library: HMC1NOT01
  immediate source clone: 003109
taacaagtaantagtacctgctggtgttaatanttggtaaaaattttaaattaaccaccaacaaaaaaaaacctcctaacttgaatggtgatnttgncttgagtacctctaaaccatcgaaaatacctgatacggggagtaggttcatggttttggtaaaagaaactatgtcacagagttttaatattataactggacttctaaatcataaagtaagaaaattaacatcatttagtatcttttcttgtttgttttttattttgctaagaaggaaccagattttatatcatcattcttcatctaaatggactgccatatgaagttctggtttctctgtttcttcttggttagctggttactaccaaatgcctaaggacaattctcagagcatttccacatgaaggtgattagttttcatttaataaaattaataacacattacatgtagatgaaaatataacaaaaccatacgaaagcttgtcagagatattcaactagaaaactaaaaccagtagccactaggaaaaaggcatagtgggaaaatttttttgaaccgggtatgctttttgttggaataattacagtaattactncccactnatattcaggccacaaaggttaggaaggncatgcaaattntgggggaac

SEQ ID NO: 30 - DNA, 2021 bp; single-stranded, linear
  immediate source library: HMC1NOT01
  immediate source clone: 003119
acttctgtatgggcaagcctgagagggagaggaaacaaaagctgtgtcctggcagaaggttgggtttgcagatgggtgccctgaatggaactactttaactaatccatagggacttctggtatgctttcctctctttttaaaggaacttcgtgacactaaacattagcccaaaggacttcttagccttcaattgggagatacctttggtctgctcctgcaccaaagccatatgggtggaagtcagttggcctccctggttctgcagagggccagaagaatgagagagaggaagactgctggcagggaaatcgaggaggcgagactagaactgcaccagcttccctgatgtctgcagccatggctttgcagtgcagacagagcttctctgggatgctgggattcttgcctgtatgaatgcatcaagtattcatttattgcccgaataggcattgcattaagtcctctgtaaggtgtcaggcaagccaaaaaaaaaaaaaagatgcgtaagtcctaacccccaacagaggtgttcacagtgtagacagggaaaaaatgtataaacaaatgtgtaaaaagagaaatcacctcatggcttaggatggaattagagacaggtgagggacactcaggagctcattttccagctgctcttcagagtggaagggctggctggatcgggtaggtaagcnatagctggattttttagaaaagaaatggatacagtctaaagaattaactcacccggtactttattctaagaagggtctggcatccatatgaggaaaaatgctcagctccaggaaagatggggagtccaagtggattaatgatgtcatgcataattttaagagacaagggagaaaacacaatgtatagccagagaaggagaagctcccatccaaatcctactaggaagagagtgggctgcagatgaatctgtgactcatgtttccctgatttcaaagggcatcctggggccattggggaacatgcttgcagtatctctccctgtctgtctgctcacataagcattccgtccatctgagctcatcgtgctactggtatgtgtatgtgcagttacacagttttctgtatcatagattctagtgtgtttatacaaggagacaatctgtggtttccccaaccgttccaaaaggctatttcaaaggaaccagccaacgtatgagaaatgaatgtaacactgtggacattgacttcccgcataaggcagggtgaccccctgaactccagatgtctgcacagtatcttatgtgttgttttccgttgtgacgaatgtgattgggaacatttggggagcacccagagggatttctcagtgggaagcatttacactttgctaaatcatgtatttattcctgattaaaacaaacctaataaatatttaacccttggcacacagggagagtttctgggttgaggaggatgggtggttcattcagaagctcagtgggtttcaaattttcaaataaacgtgcaactagagagagaggagtaaagatcacccagagaaacctggtgccagttagcagctcagcatcttctttaggtgtgaccttaagaaaaagcagattgtatgactctggggggtgtcttacgaaacttgaagatgggcctaagggattgaaggaaacaccaaattctgaacgattgttataaaaacgtcctgcctagattttctgcacgttacttgtgatagctgcgctatttgttcttccaagaatttctttctgcagatatttctggacacctactaaatagacactgctcaggtactggggctatagcaatgaaaaccagatgaggtctctgatatcatggagcttgacatcataaataaacaagatgcttggtaatgatggtgatgaggatgagggcaggctccaagcagtcacctggcaggcaggacatccttcaggtccaggcttaggaaaggcctccaagcagaggcaatgtttnggctnaggcctnaaagatgagcagcaaacagccttttaaagat

SEQ ID NO: 31 - DNA, 1189 bp; single-stranded, linear
  immediate source library: HMC1NOT01
  immediate source clone: 003122
ggaaatcttaggtgcatctgtctgcagacctccttaagcaggctgtatcttacaattcccttactgcactgggtaagtgttaacttagtttttgttgtttgctcttttgctttaaatattctccaaattaccatttatgcaacatggttagggttaatactgcatggtattcatttatcttgtttcatgaactttccagtactgtacaaggtcaacaaagtaatgcctgtggtatcctcatctctcacttttttactctgtgattttagcacagtaaggtactgcaaagaccttccttccaaatgttctccttgactttatttcttgggccaattcagtatcctcaacatcctaagattttgttgttttatcactgacctgtggttggcctgttttattctaatttccagaaaagtcaagtcccagtatttgcaatatcaaataactctaaaaccgatgtgtgattctaccttccttactatttttactgggcaaatgccctatttttttatnnttattatttttaacttttgggacacacaaaaatcagcaattctcatgaagcgtttgttagtgtggcagacttgtctaattcctgaaactcattcatccccttgagccagccaatggggaggaataggataatgcaaacacatgttttgttttctcattttcaaataatttaccatgttaaaataaacttttctttgttttttatttgtagagtcagctaagtacccatatttaaatgccgtctttattatttttttgaggtctttgtttttgtctgtttttgttttgttttgttttgtaaataaggtaactggggcaatcaaacaccttttggggcttctggctttagtattttatcagccattttaaaattaaatataaaaatcctttgtaagaaacttgcatcctaatttttctttattgcaattgaaagtgtaaataataagacaatgtaagtaagaccttcctaatgtctaatacaaactgggctccagcaagtggccctatttttattagggttttgaaggnnnnnnnnnnnnnnnnnnnnnnnnnnnntgtttttcttttttaaatgtatagtagagtggtgtctgtataagtgttacctgtagtggggttttgtccagcaagcctgaaatttatactttgaaataaaactactgggtttttaacattc

SEQ ID NO: 32 - DNA, 290 bp; single-stranded, linear
  immediate source library: HMC1NOT01
  immediate source clone: 003203
agcgcatatctgttccttctttatgatgcctttttatggttctgaagtaattactgaagagttgagaatctctttaatgcatttncttaattcttacaatggtgataagttacttcaattataaaattgaattttgcagactaaattattttataaggctgttgctattgaaagatcaattttgtctttacctgcatttaaaatggaacagctcttagcagctgtggtttttttttccatattttttttaaatttgttggctcttaagatgaataaagtttatagggtgc

SEQ ID NO: 33 - DNA, 468 bp; single-stranded, linear
  immediate source library: HMC1NOT01
  immediate source clone: 003228
acttgagatggggcctgccatccgagggactgtgttgtagattgtgatcaaggttgattggcaaaactgggcagcttttgcatggtgcctgcttactatatctgaattcagcacctcatttttgtgggagttgtaatacccacaattaaaaaaaaagtataaaagagaaaaatatttgaaggtgtctttaacctaatgcgaggaatgcatgttgtttttgtttgtttattgtagtgtgatgccttttcccttacacctactaactattcaaattaataatacttacttagttttagaatgtttattttatgtagtcattaatttttagtaacttcaaaggaacttgtttgctgtgtctattattttgaacataattccatttccctgtgtacagaggatcacatgtatattcacaaatgtagcaattgtgtgcaccagaaataaaccccctttncaacctcnaaaaaa

SEQ ID NO: 34 - DNA, 395 bp; single-stranded, linear
  immediate source library: HMC1NOT01
  immediate source clone: 003256
ggaatctgaggaatttcagaaaatcctaaaagcaaaatcaaaacacacaggcatcctgaaagaggccgaggctgagatgcaggagcgctactttgagccactggtgaaaaaagaacaaatggaagaaaagatgagaaacatcagagaagtgaagtgccgtgtcgtgacatgcaagacgtgcgcctatacccacttcaagctgctggagacctgcgtcagtgagcagcatgaataccactggcatgatggtgtgaagaggtttttcaaatgtccctgtggaaacagaagcatcttccttgggccagacttccgaacaagcactgcagtaacttgtggcctctacaaaatgggnacgggcgggaattctnaaggnaaagncttggtccancgttggg

SEQ ID NO: 35 - DNA, 1497 bp; single-stranded, linear
  immediate source library: HMC1NOT01
  immediate source clone: 003269
agtggggctgctgaaccttgggaagagtgtgagtgtgaacgtgtgtaaatgtgcgtgtgaaagggagcaccccttcccgacttctagaaacaaaattccttttggggcgctttccctgtgtgtccccagagaggcctctagccaggagccttcagttgggatagtttcatttgtgactttaccaataccctcccagttcttgatagacagctgtaggttgctgggttcaagaatatgggtgggatatggaatgctctttcaatgtctagcttcagttttcattcatcctcctgctcagcactgtcagccaagagcttactcagcagacaccacatactgcagcagttcctagtgagaaaatctgtgccactagaaaatgcttcacttccatttcctcacctgggcagttctctgtttaaaattgtgggctgatttggtcttcctctcctcctcccactgttactgccctgcagcccttgttcaggtgtacagacccttattctggcctctagtgtccttgtctgtcatgacacacccttccgcccaaatacctctgaccccaaggctggaatggggctggtaggagataagtttgcttactcatagtcatgtcctttctcttggcacctgcttccctgcggtgtcctcaaatggatttctgtgtggcagtggagtgattgcatgaatttttctgtaacacattaactttgtattattattaagggagtttgagaaagctttgcttataatgtcaaggcaaggaggtaaaaactggagcccaaagaaattcccttagggcaagattatgttataatagaaaattgaatttcctgaggcagtggctgccacccccttttcagatgtttagtcctgcaaatagcatctttcttgtagtctgtgacatggatggggatgctagggcccttaggggcaaggggactaaactaaatcaagttgagttttttttccagcaggggttaggggaggtactcgctgttgatatttgacactagaaagtaatcttttttacaaaactgtttttctaggtgggtggaaagtgaaactgccacatccttgttggtttagtccaagagatcatttgcaacaacagtagatgtccgggttttgtttctgtctttttattatgaaaaactatgttaagggggaaaatgtggattatggtaaccagaggaatccctagccttgttttccttagaagacttgtttagtgttttatcagacgtctgttgtagttgtagacaggaaagcttgtgagaaaaacaccacatggagcctgtaaatgtttttgcacaacctgtaaagcattcttggaagtggccagtaaaaaggggttttaccatttaaaaaaaaaatgtaactgtgtcattgtttacatctgtaactttttcctcccctgttctcattacaccattctggcgaaaatgtaggcaaagtagcttccagttttagaataaataaccatttgggttgaattca

SEQ ID NO: 36 - DNA, 341 bp; single-stranded, linear
  immediate source library: HMC1NOT01
  immediate source clone: 003311
gtctgatgatgatgaccctgctttgaaatctcgacccaagaaaaagaagaattcagatgatgctccatggagtcctaaagcccgcgtgaccccaactctgccgaagcaggaccgtcctgtgcgtgaggggacccgggtagcctctattgagacaggtttggctgcagcagctgcaaagctggcccagcaggtgaagaaaatgaagctctcattaactgactcaggataatacagccagtaaatggaggagacaactcaaactcatatcctctaacttcaaatttcatattacctttctatttaaattaaaatgcttatgtaggttcaagtcatttacatcc

SEQ ID NO: 37 - DNA, 1397 bp; single-stranded, linear
  immediate source library: HMC1NOT01
  immediate source clone: 003437
ggacctcacaagcccccaagcaggggcaacaggtgttttggagattagagaccctagccttgttcctcaggctcctcttaaagaatctgacccctgagggtgctgggtagagtgaggtcgacaggagcggaaggtctggagtgggtggggcggagtgggagggacgcctagagatggcaggaggaagacctgggcgctcttaaccacccccaacggcctttttctgcatgtctttttctctgtctcctccttttctgtttcttctcccagacaggtgaagaaacaagaaaactaagaaatccgagcggttggagggggagtctgtgtggatgggatggggacgccgggggaggggctgggccgctgctcccatgccctgatccggggagtcccagagagcctggcgtcgggggaaggtgcgggggctggccttcccgctctggatctggccaaagctcaaagggagcacggggtgctgggaggtaaactgaggcaacgactggggctacagctgctagaactgccacctgaggagtcattgccgctgggaccgctgcttggcgacacggccgtgatccaaggggacacggccctaatcacgcggccctggagccccgctcgtaggccagaggtcgatggagtccgcaaagccctgcaagacctggggctccgaattgtggaaataggagacgagaacgcgacgctggatggcactgacgttctcttcaccggccgggagtttttcgtaggcctctccaaatggaccaatcaccgaggcgctggagatcgtggcggacacgttccgggacttcgccgtctccactgtgccagtctcgggtccctcccacctgcgcggtctctgcggcatggggggacctcgcactgttgtggcaggcagcagcgacgctgcccaaaaggctgtccgggcaatggcagtgctgacagatcacccatatgcctccctgacccctcccagatgacgcagctgctgactgtctctttcttcgtcctgggttgcctggtgtgccccctttcctcctgcaccgtggaggtggggatctgtgcnccccaaacagccaggaggcactgcagaagctctctgatgtcaccctggtacctgtgtcctgctcagaactggagaaggctggcgccggngctcagctccctctgcttggtgctcagcacacgcccccacagctgagggcctggccttggggtactgctggccaggggtaggatagtataggaagtagaaggggaaggagggttagatagagaatgctgaataggcagtagttgggagagagcctcaatattgggggaggggagagtgtagggacaaggatccactgggtgaatcctccctctcagaaccaataaaatagaattgacctttt

SEQ ID NO: 38 - DNA, 244 bp; single-stranded, linear
  immediate source library: HMC1NOT01
  immediate source clone: 003440
ggagcatctaacgcctatgaaagcaaaaagaggttgttaatagactctttgaggatcctgaggaaaactaaagtatatactgtgaaaactttgagaagataatacatatgttcacgtcaatatacaaccatttggcacagcttcctgggaggaataataagaaaaacatgctttggaggaaaactcaagatacaaaaatgaatggctatgcataataacaataaaaatgtattccccaaaaaaa

SEQ ID NO: 39 - DNA, 1424 bp; single-stranded, linear
  immediate source library: HMC1NOT01
  immediate source clone: 003442
ctcgagccgaattcggctcgagaaaccatgtgcttcatgaaacctacagttgacaagagaatgtacagctaagagaanagcttaagaggcaccactattcgcggaatggctttagaggcagatgaagtggtctttgaccacagttgtattgaaccagagcacttattgcttaaagattaacagagttctagagctgggggttcttgggccatgctccgtgtgtggataaggaaagaaatactgtttctgggactctcccacagtcacaaagctgttttcactgtggcccctacatctcttaacttttgctattactcctatgctgccttccggattactgctgtctatcttcttgctccactcactgaagatcctattataatccccatgaaaatgtaaattacagtttacttgggagagccagattttgtctgtgctcttgagttttttattcattcaagaaaccttgggccaccgctttgtacatagcaccgtgctaggctctgggatcccaaatggacccttttaactttctgaagatgggaccgtcccctggaggaaagtcattcctgcctaatccatcgagagaaagaggcttacgaaaaactttgcctctgatgctcagccccacccccaaatagcacacaagcttgttaaccccacctcttacaaaatgtttagattctgtaggtgttaaaagcctttctggaagtattgcattctgccgtgtttataggtgttcactttcctccagagctgattaactactgacatgacttggctttctcatccagaaattatggaaacagggtctgtcagtggcaggaggccgtgctgtgttttacttggatgacacaatgcagtttacttgcctcttcatacccatgcatgctgctcaccctagacaatgacatataagccgtatatagatcaatgtccacatatatatacacacacacatatatatatataaagtgtaacaaggaacactaaaacagtgttgattcttgtctctgaagacaaataattaaaccttttttttcccaactaaagaatggatttaattaaactatgtattgaaaaaaaagtagcctaagtgttagagatggtgaatatattccattttagttaaagaacaaatttcctgaattttaagcattcagtgagctgccaattttgattttgtgttgctctttacccaaattattttttctttgtttttctttttttgggggaggaggggaaaaaagcagcaatactgtgtttggaaattatactctgtatctggttttcctgtgtatgttaaccacttaaatgttattaatcctgctttgggttttaggagtgattgtgaggcattcaattgcaagtatacagttattttctcattaaaaaacccaatggtgtgtttgaggttttaataa

SEQ ID NO: 40 - DNA, 626 bp; single-stranded, linear
  immediate source library: HMC1NOT01
  immediate source clone: 003759
tccagatccagagccgggaccagaggctgctgacactgtcgctggacaaggacgatcaacgcactttcagggatgtggtcagattcgaggttgctccctgcccagaaccatgttctgggggcccaggaagtccaaggcaccgtgggtcaatttgcatgggcaacaggaggtggaagcaatcaaagccaagcccaagccccttctgatgcccatcaacacattctctggtattgtccagtgagcctgcagggacagcaggcccaggaggaaggatacactaccccaccaactccaaacactcacaccaacagccagagcaaggcccggctccacacggcagctttggccttgacccaggagccagcgagtgcctgggagcacagggagcctaccctgggggcttttnatgaggaagggcccacatggaggtctacggatggcccaggcaatgctgtcgctgcttgaggaacatacacaacaagcccagcttctcatacaaatgtttactcctttcatttagcttcaattcccacttctcccactgtcctctcccacccaagctccccatccagcccttaaaaccagggttaaagctgctgtcttggccagagccctgtggcctaggg

SEQ ID NO: 41 - DNA, 1279 bp; single-stranded, linear
  immediate source library: HMC1NOT01
  immediate source clone: 003770
cagagaaattggaacagtgattgatcagattgctgaaacactatgggaacaggtattgaagcccctgggtgataatttgatggaggaaaacataaggcagtctgtaacaaactctatcaaagcaggcctgactgaccaggtgtctcatcatgccagattaaagacagactgacagttcatctcctcacggactccactctctttttttttcatgcttgctgtacaatgagaactcaaataaaaataaaccaaagtttacaatcaactgtagaagtagtttagtgtaactggcttcacagatggctgccacagagtgtgaagattgtttgttagttttaagcattcttttaatggctcctaagacatgcagatggactgaggagcattggttaatcatgcacctttgtgccatgtttaactcttttatttctttttacttaatctaatgttagtgaatttgtcttatgtaaaaggatatttcagggaaatattttcagaaatctatttagagtctctttaacacagtgtcccattgaaattttaatttttagagaatttatgaatcactgtttcaagaaccagattggaaagacaatgaagcctttattgagccactacattaaaagtatatattgctttactgccttcaataccagtattacataaatgcatgtatcagaaacttcacagaaattacatggcaactcttgtagctaagaaagtaattctgaggtgtacatttgtcttgcctttttaaatttataaacttgccctaaaaggagatgcatatctgggaaactgaactgtctttttgcagtttagccttcatgtatataaaatatgccattaattttattggggaagaaattccatccaaaaatgttgcctacagctatgagttaagagtgtctgtacagtgtgtagcttttattttctaaaatcacagatagggcatgtatatgacttataaatatataaatacgattttgtattaaaagttttgtagtttatggcaaaatctggtcctgtggtagggctaaataaagtacagtccctgtgaaaggaatgtttgtggctccatgtccagtgtgtggatgcatagacaatttgaagtttttgatatatttgtgatatttatcttgagcactgcaatctcaccccccccccgcccaccaagggaattcaatgggaatgtttattgtgactttgtcctctgttgcattttaaagttatttcctgtaatttattttcagtacataattaaaaatttgttgtatat

SEQ ID NO: 42 - DNA, 1640 bp; single-stranded, linear
  immediate source library: HMC1NOT01
  immediate source clone: 003842
gttgattccaccatctctagttcttcttccactaaaggaataaagaggaaagctacagaaattagcactgcagtggttcagaggtcagctaccattggcagttctccagttctctatagccagtcagctgtagctacaggtcaccaggcagcagggattggaaaccaggcaacaggaattggacatcagacaataccagttagccttccagcagcaggaatgggtcatcaggccagaggaatgagcctgcagtcaaattaccttggcactagcggcagcacctgcaattatgagttatgcagaatgttctgtcccaattggagtgactgctccctcattgcagccagttcaggcccgaggtgctgtgcctaccgctaccattatagannnnnnnnnnnnnnnnnnnnnnnnnnnggctncaccaccaccagctcccaaaatgccaccacctgaaaagacaaaaaaaggaaggaaagacaaggcaaagaagagtaagaccaaaatgccatctttggtaaaaaagtggcagagtatccagcgtgagttagatgaagaggacaattctagttccagtgaagaggatcgggaatcaactgcacagaagcgaattgaagagtggaaacagcagcagctggttagtggcatggcagagagaaatgctaattttgaagcccttcctgaggattggagagcaaggctgaagagaaggaaaatggctccaaacacatagtttttaagtttttaaaacttttttgtattattgtttgttttgtgttcagttcaaagtcttaaccagttttattgtcaaataaactattaaatgttatgggggagatcttattaaatttcctggggcaagagtgtatgcatacaaagttttcacttttgtgaaatgtaatttttctgtttttgcaaagggatgaggtgattggaattgctttgaccatgctgcctttattctcaaactggcaaacttagcatgttaggtgtattaacttcatcagtcttgaagaacatgtggctcatgagtataacacttctgtagaggactccctgacaaaagtgaagaattaacttctcctccagaacaagtgcaattcagaaggcagctctgcattctaccttgcttgactggaattgtctgaagctttttctggcctcttttctctagtcggccacccctgaagtgctgaggtctaagctggtttacctcgtgcctgataggatggccacactctttagagtagttctcataagttctagaactggtagctcggtcgtttcgcacactaggtggcatacaggcagcagcaggtgttcatatccttgattttgagaatttcccctcaagtatgtggcagtaaatacaacaagacactctatgtattaatgtctccattgtcttaaccctgttccaaaacaaaattcacctcctttctttatgtgaatgtattctccataaaattccagtatttaaaaagcagtttactgttctgtactttctgttgtatcacaatcaggtaaaagtcactttaaactgaggaaacggcaaattgtgttttaaagctctttgtatttctccagtttctgaccttgtaaatttgtatatatgcactaataaagctttttttataatcctg

SEQ ID NO: 43 - DNA, 667 bp; single-stranded, linear
  immediate source library: HMC1NOT01
  immediate source clone: 003847
accaaataaagaattgatgacctcaatctgtgactgtctgtttgctacgctagctaactctgagagcagttacaactgtttactgacatgttagaacaatgatgtttcttgcagagcatgattatggattatttcatttaaaaagttctttaaggaaaaacagtagtgctctgcatagtttactgaaacgagtggtcagcacatttagtaaggacacaggagagcttgcatcttcatttttagaatttatgagacaaattcttaactctgacacaattggatgctgtggagatgataatggtctcatggaagtagagggagctcatacatcacggacgatgagtattantgctgcagagttaaaacagcttctacaaagcaaagaagaaagtccagaaaatttgttccttgaactagagaagcttgttttggaacattcaaaagatgatgacaatctggattctttgttggacagtgtagttggacttaagcagatgctggagtcatcaggtgaccctttacctctcagtgaccaggatgtagaaccagtactttcagctccagaatctcttcagaatctgtttaacaataggactgcctatgtgcttgctgatgtcatggatgatcagttgaaatctatgtggttcactccatttcaggctgaaga

SEQ ID NO: 44 - DNA, 770 bp; single-stranded, linear
  immediate source library: HMC1NOT01
  immediate source clone: 003876
aaatttcttaaaatttttattaatcatttgcaagtaacaagaaccaagtatatataaacacataaaaacatttttggcaaatagctaattttatttttttcacatattaaaacccactaaaaataaccatttttctaactaaccacaacaaaaattagtgagaagagtactgctgctttacatttctccaaatctcttcaatgtctgatgacagacgaaagctggaatcttgtatctgcttttgcattcagcctattacaatatcacaccagatagcctcttgaaaactcctctgcatactcatggcctgaattcaaatattgtagtttaggttcaaacagagtatggctgttgcaaaatttaccaaatgtgttgattacctcttttattaaagaaatgttggggagagggtaatatattgtgacaatttttgcaacttacagggaataggacaggtcattagggtgtatttcccaggtttccaattgagaatctaaaccaagagaagtgagacaaaccatctaatatctgtatcatgctattaataggctgtgatgttgagtttctcacttactctttctgaggtccagggtccttatatgaagagattcatatatatgaagagattcgtctagagcagtggttgtcaaagtgtggtctgggggggcctcaagagcctttcaagggtattctaggtcaaagctgtttttataacactaagacatcatttcactatttatagcttttccttttttttatttgagaaggag

SEQ ID NO: 45 - DNA, 554 bp; single-stranded, linear
  immediate source library: HMC1NOT01
  immediate source clone: 003911
gaaaaccaaaatatgtgagtgttaataaagaaaagatttctcaaataaattctaaaacatataattcaggtattaggaaagtgatcccagattagatttttgagatccaaaaaaaatgaaaacctaggaaagtagcaaatatgtgagcaaaatgaaacaaatacttgttgtaaaaatgatggtttgtagaggggtcaaacatcaaatgtaatattgaaataccaatattatatagcccagaaactataataacataaagttcagaagagtgtaaatagaatttatattacataaagtctttatatttttccagagaaaattaaatgttatgatgaatgttacatttggataatttattattgtaatctcgaggaaatttacttaaagaatcgaagccaagtttaccacctgtgaactagaggaagtataaaaggtgatagaaacattattcagtcaaaccagagaagacaagaaataagagattaaagaaaaaaaggatggatagaacatgtagaatacaagtataagattctgtatttagactccaatacagt

SEQ ID NO: 46 - DNA, 704 bp; single-stranded, linear
  immediate source library: HMC1NOT01
  immediate source clone: 004225
ctgggaaatgtagtctttattctaggnggcatacccacttgaaaaatcaaaggttctatcattatgtgaaaagtaaagnatggatattgaaggnaaattggtgctctctgcacatctctnatttagatatttgtacagaaattcaaacttgaaaatcattctnctgggantatgacaggnatgactagctgacataccaactattctgggntttcatttataanggcctagtttactnccctttgttcatccaaaagcaaatgaaatgcaaaacattanctgnatcgggtcccacggtatgttttatttngnataaaacccaaanttaaggtgatgtnatacctctggggcctgggaaatgtagtctttattctaggnggcatacccacttgaaaaatcaaaggttctatcattatgtgaaaagtaaagaatggatattgaaggaaaattggtgctctctgcacatctcttatttagatatttgtacagaaattcaaacttgaaaaatcattctactgggaatatgacaggaatgactagctgacataccaactattctgggttttcattttataaaggattangtttacttccntttnttcatccaaaagnaaatgnaaatgcaaaacattnccctgaatggngttccncggtatngntttanttggnataaaacccaaattaangntngttggaaatacccc

SEQ ID NO: 47 - DNA, 751 bp; single-stranded, linear
  immediate source library: HMC1NOT01
  immediate source clone: 004563
gagcaatctttctaaaatgaggatcttatcacttcacttccacactaaaatgtttttcctggggaaccacactccttagcaatctgacccatcagaccttccaggctgtctcctgcctgctccctaaggctccagccacacagaattatcatgggcccacacacccaccaaatcctcccatgcctttgcccatgttgtctgggatgcccttctctcccttctgtctacatcaagcatcagactgaatatccctcttgtgcggccttctaaaacctcccgtccaaagcgaaatatattgccctctatttatacttttacagcatttggcacacaagtacagagtagtagctttttatcacattctctgataattatatagatatggtatttcttagctctctctccaactggctaataagttgctttttgtctgagtgcctaattttgtgttttgtgtctgagtgcctcagttcctcaaaaaaaggttttttgattagttcattattcatttgaacatggaaattatgctcactagtggcaaatgccactaaccgtattccagaagctaggtgtcatgtttgcaataaggtataattatccccttctacaagtcaccttttatttcaggcatttgtaaatgcccattaattaaagtatggttcataaattttaccttgtaagtgcctaagaaatgagactacaagctccatttcagcaggacacaataaatattattttataatgcaaaaaa

SEQ ID NO: 48 - DNA, 1392 bp; single-stranded, linear
  immediate source library: HMC1NOT01
  immediate source clone: 004700
atttgaggaagtacaatgaggccctacaaattaatgacacaattcgaatgatagatgcgtatactcatcttgaaactttctataatgaagagaaagataagaagtttgcagtcatannnnnnnnnnnnnnnnnnnnnnnnnnnnnnnnnnnnnnnnnnnnnnnnnnnnnnnnnnnnnnnttaaagaaacctttgaaactggatgaaacagatagatttctcatgactttattttttgaaaacaataaaatgttgaaaaggctggctgaaaacccagaatatgaaaatgaaaagctgaccaaattaagaaataccataatggagcaatatactaggactgaggaatcagcacgaggaataatctttacaaaaacacgacagagtgcatatgcgctttcccagtggattactgaaaatgaaaaatttgctgaagtaggagtcaaagcccaccatctgattggagctggacacagcagtgagttcaaacccatgacacagaatgaacaaaaagaagtcattagtaaatttcgcactggaaaaataaatctgcttatcgctaccacagtggcagaagaaggtctggatattaaagaatgtaacattgttatccgttatggtctcgtcaccaatgaaatagccatggtccaggcccgtggtcgagccagagctgatgagagcacctacgtcctggttgctcacagtggttcaggagttatcgaacgtgagacagttaatgatttccgagagaagatgatgtataaagctatacattgtgttcaaaatatgaaaccagaggagtatgctcataagattttggaattacagatgcaaagtataatggaaaagaaaatgaaaaccaagagaaatattgccaagcattacaagaataacccatcactaataactttcctttgcaaaaactgcagtgtgctagcctgttctggggaagatatccatgtaattgagaaaatgcatcacgtcaatatgaccccagaattcaaggaactttacattgtaagagaaaacaaagcactgcaaaagaagtgtgccgactatcaaataaatggtgaaatcatctgcaaatgtggccaggcttggggaacaatgatggtgcacaaaggcttagatttgccttgtctcaaaataaggaattttgtagtggttttcaaaaataattcaacaaagaaacaatacaaaaagtgggtagaattacctatcacatttcccaatcttgactattcagaatgctgtttatttagtgatgaggattagcacttgattgaagattcttttaaaatactatcagttaaacattaatatgttatgattaatgtattcattatgctacagaactgacaatngagnctcaataaaaatgattgttttactctgc

SEQ ID NO: 49 - DNA, 2119 bp; single-stranded, linear
  immediate source library: HMC1NOT01
  immediate source clone: 004773
gtgagccaccacgcccggccgatttggggcatttttatttaacagaacttctctaaccttccaactgcttcccacaaacacattggcctcaaggctccttagaatcccagttccagcttcctaaaatagacagtgggtatcgggcagcagtcactggggctcaagggcagtgagcaagagaaatgtctaaagctgcttctcccaacaccgtccaaagtctccactgcctgagttttgtttcggctggtttgaactcatttcgggtgtgtgcatttttcttttggtacccatgtgagacatgaacaacaggagggagggaaagagcccaggtgggacgtgggacaggcttaggggaaagagcttgtcctatctcaggaacaaaattataggctgtgggcagagggtctgaaaggtgggctttggggtagtgcccaagcctggtcgtgttgccaggagtggtgacaagaaatgcagcttacatcaaacgaacatgtagtgcatgcccactgcctgatggccagatggcctgtaggaagagctaccagggcttccagacctgtggaacgaagaggatggggaaaaggcagagggcactgagtgtccctttaaaaactaacccactgaatattccgtgtgatctagaacagtgtggcagctttcacagcacaggaccgttcatcgggggcctaaacgtttccctcagctctgtcaccaactcacttctctcggcttcgttgtctgtaaattggatgaaaagagctctaatgcctttcaggctcttagaagccatagatttggacaagcccagcaagatgggtgtccttccaggcctcttcccctttcctccatctctggcaacagttcttggggtttggcaattgtttggattttttttctttctgcagttgtgtgtatgtgtgtttgtgtgaagaaaaacagactctgtccaggtagaaatggtgaggagggggaagagaattacatttccagggtcagaaacttggcaacagttttcctagagtgactcagacacaccacagtaacaactctcgctgcaattttattttaatttgagaaataaagatttcctccaagccacatgaggactctggcacccacccacaaagcaagacctgtatttataagccgagggctcagggagcctaactgcgggacccgtcagggccccgtgacccatccccgtccccacccccccctccaccgctgggcccatcagtgtgtgttggggggatgcttggcagctgggggtgaggagacaacaaacctcgggaactggagccagagctgcggcctgactgacgccttttgatgctcacgggaaatttctgcccaggatctcagccccaggctggttgtttctacaaatctctctcaaatgtattattttggtgacaaaaatgaaggagctttgtaaatttttttaaaattatgaatcatatcaagtagttgtttacatttcttgaaaaaataggaactcgggcagcagaatcagattggcagaatctttagactacacaggcaataatcaagtctgctgttttggcctttcgtagtagaagtggttgtagtgtttagatatctgtttggtcttgcttcttgtattgcatttttttcaataaacaacaacaaaaagaactctctctgtgaggattgatccacttttaaatttctcttctaccagcaacttgggaaaaattaaatatgggtgggggagacctaaactcaagtcattttctaaagtaagttacccacattgaccaaaatgcagcttcaacgttgagtaaagggatttctgagagctggccaatgccttttgccagctgcagtgaagattctgcagcataggccacgataaaggaaggagagaaggggcttctcagacttatttgcagaggggcccagaactcagtatgaaggcattggcattagtgtactctagagggatataccccagatggctgagggaagaaagggattgaggtggtaggagttcaaggctcagtcccctccccagatggcagtggagatctcatcccgtggtccatcttcccagaggccccacactccatcaccagtgccgccttggagggagcctgcc

SEQ ID NO: 50 - DNA, 1922 bp; single-stranded, linear
  immediate source library: HMC1NOT01
  immediate source clone: 007648
gggctggcgggtcagagtcccgggtccaggccggggctctgactcgcggttggtgttcccccgancccgcagcgcggggtgtcctgtcctcgccatgaggccgcagcaggcgccggtgtccggaaaggtgttcattcagcgagactacagcagtggcacacgctgccagttccagaccaagttccctgcggagctggagaaccggattgataggcagcagtttgaagaaacaaattcgaactcttaaataacctttatgcagaagcagagaagctcggcggccagtcatatctcgaaggttgtttggcttgtttaacagcatataccatcttcctatgcatggaaactcattatgagaaggttctgaacaaagttccaaatacattcaagagcagattgagaagatctatgctccacaaggnctcctcctgacagaccctattgagcgaggactgcaagtatttagattgaaattaccatttatgnagacagangcatgancagtggaagataaaccgaagaattaaagancccacttccagccgggcccctcatgtatccactggccgaccgcagagtgtccctacctcctctccagagcatcattcctttctatctgctgccagagccacggtgccatttactccaaggactcactttctaaaattccacacctggagtgacctctagtcgctcagcatccactttgtgtctccaaattgtgtaggactctgtaatcttttgattagtttctgagaaaacacaatgaagcacttcacttttttttattcaaagccatttaataaaacacagttggtcagcccagtgcaaagcttgttatctgccaccagtacataccattggttctcttcattccttgggccagcttctcaggtggctttagacctcaacaagccgtatcttcaccagtgttctatcttgttcccctaaattaataaaatgtttttctccaggattttggtgagggttggctgtggctgtcgttttgcacctcccagatttcaaagaattactggttttaccatgactcaaatcttaagatctgtttctactattcagttcctcaaactgaagcttattgaaaaaaaaatgtataatgttatttgttttattatagcaattattcctaattaaagcagtatttaatgcaatttccagttatttctttggagaattttatgtcattgttccattaccttgaatgttggaaagatatgatacgtgctgcttgttcatcacaaaaatcagtaagcacaataaagtggatgccaaaccatcagacacataaatgttcccgctgtgtccctggatatggaataagcaggtataaaaaatattttaattatagttttgttataaatataacttatgagaaaaaaatttgataggaataatactgtatattactaatttttaactatccctaaggcaaaccttatgacccacagaattttctccatatacagtattcagtgcacagaacatcttatgattggctcaagtacagtaagttacttctcagtaaaactctcaagtctgagtccatatttgtagctctgcttttggctgtacggtcctaggatcggggctgcttatgcctttcgtttatccttggggtttgagagcgctgtatttgggagagagtttaaaaatacattaggagagagaaaccattaaaagtttcactgtcagagatattgtaggtgctaatactggatttcgtctcagatttaatttcttttatgggtctgttagtcattcaacaaatcccataagtatgtgttaatattttaattgtgtaaaactcatttgttactttacagcctgtaatagtgtgtctgcattttcaacctgttgcaataactttgctgaaatattaacacattaataaaacttttctt

SEQ ID NO: 51 - DNA, 1633 bp; single-stranded, linear
  immediate source library: HMC1NOT01
  immediate source clone: 008007
caggagctccagtgtcctgagctcagcgtggaggggtaggggctgggaacagtgtgcaaggcagccgtgggccccaccctcggggatgtgtcctgacactgcaattggcaccgaagcccagagggtctgggggcacaagactgacgccagggtatgaagagtgttattttcattcaaagtgttattttgtttttccttccaatgtctggagaccaccagggcatctctgggctggatgagctcccacaagcctgagggaaaggccagcactcgctagcagtggcaggcagaggcccaggctgccgtcccctagagtcccaggttggctctgccagtcctgtcctttaccaaagatgaatgaagcaaatgtcatgctgccttattcagggaaggaggagcctgtcctgcctgtggccatgaaccctgcctctcccaggcaggggcccgcgatgtggaactgctgccactgaggggggatccagttttgtcaatgcagttgtctctgttttacaagttggagtcactcttatgctgtacccagtttctaaactggagactgtgtgtgccctctgggctctgagtacccctgctttgggcttgggcctaggctgcattgaaaagagctgaaggttgtggcctttgcgctcctggcccagcctttgttccccactggagcagaaggggagatggacgacacggtcggggcatctggcctggccagtgccctgatcccagagagcccgaggaggtgtctcaggctgcctgagtcgtgacctgctaggccagagcccactccatctggtagaagggaaagcccatatgctaccaccagctgtgtccaaaaccgccagctctgttcttcctcagccagcctcgcccatccccttgaggtctcagcccctttcccttgtagctcctcccctggagggggaatggcagcaggggttggggaaacagcatctccaagcagcttagagttggccatatttacctcagcctgggcgctggtcctttcttccggcccctcccctccaaaatgtgcctattgctagagctcctccctctcaacacccagtttccttgggagttgtcattnnnnnnnnnnnnnnnnnnnnnnngccagtgcccagggatgggcatctccagggagctggggattagtgccaggcagccctgccagccatgcctacatccccatgggcacagaacaagccaaagccttcgttgtatgttgacgatgcacttttatgaatgtagtttctatcgctgtttttagccttttcacatcatgtaatgtgaggccttgtacttgttaatttatatctcagatcatatttgatggtttttatatatatcaattctagactgttacaggtgacggacgcctcaagagagagaagagaaaatgaaagcagctggttttgcagaagtgtgtgtcgcatgcgccagttgggcctggaccctcctgtgtccatccctgttcccccaggggctctatcagcccctgtaccccacactgccctctgaagacaacacaggctcctgcttccacctcggcccttgcccagggtggggcctggccctcatcttgaccaaagctgctgtgtggcagtcggcctctctacgaccccat

SEQ ID NO: 52 - DNA, 1415 bp; single-stranded, linear
  immediate source library: HMC1NOT01
  immediate source clone: 008134
gaagagacagaggccaaggaagagaagtccaaaggtcagaagaaggctgacagtatggaggctaaaggtgtggaggaaccaggaggagatgagtatacagatgagaaggaaaaagaaattgagagagaagaggatgaacaaagagaggaagcccaggtagaagctggaagggacctagagcaaggggcccaggaagatcaagttgctgaggagaaatgggaagttgtacagaaacaagaggctgagggagtcagagaggatgaggacaaaggacagagggagaaggggtaccatgaagcaagaaaagaccaaggagatggtgaagacagcagaagcccagaagcagcaactgaaggaggagcaggggaggtcagcaaggaacgggagagtggggatggagaggctgagggagaccagagggctggagggtactatttagaagaggacaccctctctgaaggttcaggtgtagcgtccctggaggttgactgtgccaaagagggcaatcctcactcttctgagatggaagaggtagccccacagccacctcagccagaggagatggagcctgaggggcagcccagtccagacggctgtctatgcccctgttctcttggcctgggtggcgtgggcatgcgtctagcttccactctggttcaggtccaacaggtccgctctgtgcctgtggtgccccccaagccacagtttgccaagatgcccagtgcaatgtgtagcaagattcatgtggcacctgcaaatccatgcccgaggcctggccggcttgatgggactcctggagaaagggcttgggggtcccgagcttctcgatcctcttggaggaatgggggtagtctttcctttgatgctgctgtggccctagcccgggaccgccaaaggactgaggctcaaggagttcggcgaacccagacctgtactgagggtggggattactgcctcatccccagaacctccccttgtagcatgatctctgcccattctcctcggccccttagctgcctggagctcccatctgaaggtgcagaagggtctggatcccggagtcgtcttagtctgccccccagagaaccccaggttcctgaccccctgttgtcctctcagcgcaggtcatatgcatttgaaacacaggctaaccctgggaaaggtgaaggactgtgattaggaccacagccctgggcaaaggggaccagcaagttgtcttgaatctccagggttcctgactagctgtctcctctgcagcatgagcagctgtagtgcccaactctataggctttggccctccagcttctctctttgactgtgggaggcatgccttggttggtttactgaacttgtctccgacacaaaagcattaactcttangagattcccaagaagtcaacaagattttgttcccc

SEQ ID NO: 53 - DNA, 524 bp; single-stranded, linear
  immediate source library: HMC1NOT01
  immediate source clone: 008653
aaagtcttcttccctgggccctgggnatgtatgcctttctnttctactgtctaatagnanctngtaaattgtcaatgaacttttctaaggggtattcttgaattcccaactagnttgtgagcttctggaagacaaggctatgtctttgattgttgtctcccctaccacagcccagtactttagttacagaaaataataaatatttactgattgattgactttcctcttgtccactagcttnntttttatggnncannttntaccngggnttttgaaaaattcaaactgtgaacaccacaatgttatagagcatatgaggtagtagccagcatgaaggatgttttcttcctgagaaacagtgtcaagggctggaggaagagggcaaaatagcagactcagagggcaaataaattttggtattacttgtcacacaaggtatacaggtgtttttttaggttttcaggccttaatagctatgttgcatggattaagggaaccatgatgggattgcatactttgtcatg

SEQ ID NO: 54 - DNA, 2432 bp; single-stranded, linear
  immediate source library: HMC1NOT01
  immediate source clone: 008724
atttaatcggagaacctcctggggaattttgtgggagacacttgggaacaaaacagacaccctggggaatgcagttgcaagcaacagatgctgccaccagtgtctcttgacccaccctggtgtgactgcttgactgccagcggtgggtacctcccatgctgcaggcctccatctaaatgagacaacaaagcacaatgttcactgttttacaaccaagacaactgcgtgggtccaaacactcctcttcctccaggtcatttgttttgcatttttaatgtctttattttttgtaatgaaaaagcacactaagctgcccctggtaatcgggtgcagctgaataggcacccaaaagtccgtgactaaatttcgtttgtctttttgatagcaaattatgttaagagacagtgatggctagggctcaacaattttgtattcccatgtttgtgtgagacagagtttgttttcccttgaacttggttagaattgtgctactgtgaacgctgatcctgcatatggaagtcccgcttcggtgacatttcctggccattcttgtttccattgtgtggatggtgggttgtgcccacttcctgggagtgagacagctcctggtgtgtagaattcccggagcgtccgtggttcagagtaaacttgaagcagatctgtgcatgcttttcctctgcaacaattggctcgtttctcttttttgttctcttttgataggatcctgtttcctatgtgtgcaaaataaaaataaatttgggcatgtgggggccaggccgagcatcccaggcaagcatccttctgcccgggtattaataggaagccccatgccgggcggctcagccgatgaagcagcagccgactgagctgagcccagcaggtcatctgctccagcctgtcctctcgtcagccttcctcttccagaagctgttggagagacattcaggagagagcaagccccttgtcatgtttctgtctctgttcatatcctaaagatagacttctcctgcaccgccaggggaagggtagcacgtgcagctctcaccgcaggatggggcctagaatcaggcttgccttggaggcctgacagtgatctgacatccactaagcaaatttatttaaattcatgggaaatcacttcctgccccaaactgagacattgcattttgtgagctcttggtctgatttggagaaaggactgttacccatttttttggtgtgtttatggaagtgcatgtagagcgtcctgccctttgaaatcagactgggtgtgtgtcttccctggacatcactgcctctccagggcattctcaggcccgggggtctccttccctcaggcagctccagtggtgggttctgaagggtgctttcaaaacggggcacatctggctgggaagtcacatggactcttccagggagagagaccagctgaggcgtctctctctgaggttgtgttgggtctaagcgggtgtgtgctgggctccaaggaggaggagcttgctgggaaaagacaggagaagtactgactcaactgcactgaccatgttgtcataattagaataaagaagaagtggtcggaaatgcacattcctggataggaaatcacagctcaccccaggatctcacaggtagtctcctgagtagttgacggctagcggggagctagttccgccgcatagttatagtgttgatgtgtgaacgctgacctgtcctgtgtgctaagagctatgcagcttagctgaggcgcctaggattactagatgtgctgtatcacggggaatggaggtgggggtgcttattttttaatgaactaatcagagcctcttgagaaattgttactcattgaactggagcatcaagacatctcatggaagtggatacggagtgatttggtgtccatgcttttcactctgaggacatttaatcggagaacctcctggggaattttgtgggagacacttgggaacaaaacagacaccctgggaatgcagttgcaagcacagatgctgccaccagtgtctctgaccaccctggtgtgactgctgactgccagcgtggtacctcccatgctgcaggcctccatctaaatgagacaacaaagcacaatgttcactgtttacaaccaagacaactgcgtgggtccaaacactcctcttcctccaggtcatttgttttgcatttttaatgtctttattttttgtaatgaaaaagcacaataagctgcccctgggaatcgggtgcagctgaataggcaaccaaaaggtnccatgacttaaantttcgntttgtctttttgatangcaaaattatgttaaggaggacaagtgggtggctagggctnaacaattttgtatttcccatgtttgtgtgaggacaagagttttgttttcccttggaacttgggttaggaatttgtgctactgtggaacgct

SEQ ID NO: 55 - DNA, 1323 bp; single-stranded, linear
  immediate source library: HMC1NOT01
  immediate source clone: 009118
atggctctcctggtgctcggtctggtgagctgtaccttctttctggcagtgaatggtctgtattcctctagtgatgatgtgatcgaattaactccatcaaatttcaaccgagaagttattcagagtgatagtttgtggcttgtagaattctatgctccatggtgtggtcactgtcaaagattaacaccagaatggaagaaagcagcaactgcattaaaagatgttgtcaaagttggtgcagttgatgcagataagcatcattccctaggaggtcagtatggtgttcagggatttcctaccattaagatttttggatccaacaaaaacagaccagaagattaccaaggtggcagaactggtgaagccattgtagatgctgcgctgagtgctctgcgccagctcgtgaaggatcgcctcgggggacggagcggaggatacagttctggaaaacaaggcagaagtgatagttcaagtaagaaggatgtgattgagctgacagacgacagctttgataagaatgttctggacagtgaagatgtttggatggttgagttctatgctccttggtgtggacactgcaaaaacctagagccagagtgggctgccgcagcttcagaagtaaaagagcagacgaaaggaaaagtgaaactggcagctgtggatgctacagtcaatcaggttctggcctcccgatacgggattagaggatttcctacaatcaagatatttcagaaaggcgagtctcctgtggattatgacggtgggcggacaagatccgacatcgtgtcccgggcccttgatttgttttctgataacgccccacctcctgagctgcttgagattatcaacgaggacattgccaagaggacgtgtgaggagcaccagctctgtgttgtggctgtcctcccccatatccttgatactggagctgcaggcagaaattcttatctggaagttcttctgaagttggcagacaaatacaaaaagaaaatgtgggggtggctgtggacagaagctggagcccagtctgaacttgagaccgcgttggggattggagggtttgggtaccccgccatggccgccatcaatgcacgcaagatgaaatttgctctgctaaaaggctccttcagtgagcaaggcatcaacgagtttctcagggagctctcttttgggcgtggctccacggcacctgtaggaggcggggctttccctaccatcgttgagagagagccttgttacggcagggatggcgagcttcccgtggaggatgacattgacctcagtaatgtggagctttatgacttagggaaagatgagttgtna

SEQ ID NO: 56 - DNA, 2131 bp; single-stranded, linear
  immediate source library: HMC1NOT01
  immediate source clone: 009197
acagaattgagctggtttgggggaaaagtgactttcgcctgtttatcttaaatataggatgattttgaaggtctcacccgaatatctgaaaattgccattttcaaaataaactcgtcaccaaaatgatttttttttcactataaaatgaaggcaggatgaaccatatttataactaattggcaatgaacagctgtgtgagaaaggcctgtgagttgcttctaaatgctttattactaatatcaactctgtttctacagaccagaacttctgactcacagtaccactgaagttactcagccaagaacgaatacaccagtcaaagaagattggaatgtcagaattaccaagctacggaagcaagtggaagagatttttaatttgaaatttgctcaagctcttggactcaccgaggcagtaaaagtaccatatcctgtgtttgaatcaaacccggagttcttgtatgtggaaggcttgccagaggggattcccttccgaagccctacctggtttggaattccacgacttgaaaggatcgtccgcggggagtaataaaatcaagttcgtttgttaaaaaacctgaactagttatttcctacttgcctcctgggatggctagtaaaataaacactaaagctttgcagtcccccaaaagaccacggaagtcctggggagtaattcaaaggttcctgaaattgaggtcaccgtggaaggccctaataacaacaatcctcaaacctcagctgttcgaaccccgacccagactaacggttctaacgttcccttcaagccacgagggagagagttttcctttgaggcctggaatgccaaaatcacggacctaaaacagaaagttgaaaatctcttcaatgagaaatgtggggaagctcttggccttaaacaagctgtgaaggtgccgttcgcgttatttgagtctttcccggaagacttttatgtggaaggcttacctgagggtgtgccattccgaagaccatcgacttttggcattccgaggctggagaagatactcagaaacaaagccaaaattaagttcatcattaaaaagcccgaaatgtttgagacggcgattaaggagagcacctcctctaagagccctcccagaaaaataaattcatcacccaatgttaatactactgcatcaggtgttgaagaccttaacatcattcaggtgacaattccagatgatgataatgaaagactctcgaaagttgaaaaagctagacagctaagagaacaagtgaatgacctctttagtcggaaatttggtgaagctattggtatgggttttcctgtgaaagttccctacaggaaaatcacaattaaccctggctgtgtggtggttgatggcatgcccccgggggtgtccttcaaagcccccagctacctggaaatcagctccatgagaaggatcttagactctgccgagtttattcaaattcacggtcattagaccatttccagggacttgtgattaataaccagctggttgatcagagtgagtcagaaggccccgtgatacaagaatcagctgaaccaagccagttggaagttccagccacagaagaaataaaagagactgatggaagctctcagatcaagcaagaaccagaccccacgtggtagacctcttccctcctaggcttaaagtatcagtggttgagaagagcttttcggacctgttactaccccaagctgtgtaatatacttgtataacagaaattaccttctatacaaacctttttttctacttttagatagaaatgtctactttttcagcagttctgtgaattaaagagcagagtgactgtgggtctggaatggctggtgtacttgggaatgtactatcaggattttacagcaatgctggggaaatgacagggaaaatgacaggaatgaatctcaccagattttttatgtacgcacagagccttgagttacggtgtttattttcccaatcaagtgaagggtatcttcctacttnttcctacctggaaccatcttcaagctttttgcaagtggagggaaaaattncccgtggataaggttcaagttcctttaaggntttccctaattttgaaaaaaaaaaaatccatttnaaaggtncccttggtt

SEQ ID NO: 57 - DNA, 1297 bp; single-stranded, linear
  immediate source library: HMC1NOT01
  immediate source clone: 009268
cgggggcgtcctgttcctggtcctcaactcccagttctacgagaacccctccaaatgccccagcctgaagcaggctcaggaccagtggctggacgagcagctgagcatcgcgaggcagcggcactgccagcatgccatcgtcttccagcacatcccgctgttcctggagagcatcgacgaggacgacgactactacttcaacctcagcaagtccactcggaagaagttggcagacaagttcatccacgcaggtgtcagagtcgtgttctcaggccactaccacaggaatgccgggggtacctaccagaacctcgacatggtggtgtcatctgccattggatgccagctgggcagagacccccacgggctccgagtcgtggtggtcaccgccgagaaaattgttcaccgatactacagtctagatgagctgagtgagaaaggaatagaagacgatctcatggatttgatcaagaaaaaatgacgctccttcccgttcccgttcaattttcacttgcactatttttttattttgccagaaacagcagctgcacacaacctcttgctgaaatataaaaatagcccaggcaggtttgtgaatttatgtccttttgcataaatcagagagctggggccctgtcctgaattatattcaaaatagaactgcatttcctttaaaatggagcgaatgatcctgggaaatcagtttttaaaatattagactatctctgcatggatgtttgaataaattctcctaatgctgtgtttctcaactccacttttgaattggattgtattctggttagcatatggtcaaagtctgcctatcgacctcaattccaatctgacagccaagtatgatctttgataattccttaaacaaactacacctgattgtattaaattgtggtcacgattcccaaaacgctaggcaaaacaaagttcatctcctttcctttccagcggaacgaacagctgtctgccttgttgtgagagccatgcagacttattttgacaaggagccaagtaggcaccatttactgttcaattctgagacttctgatgataggaacagaatgcagttgatacagctcggagcttaaatttgccttcctgggtgcctagaaaagtcacctttgcacataaattggccatttctgaaaatctcctccaagagactgaaaccaaagctctaaaacgccgcttcttcagtctctggggagcacgttgagttggttcacatccacattctggctgtgtagccactccacagatgggtggtctcttgggatcagaatgc

SEQ ID NO: 58 - DNA, 2152 bp; single-stranded, linear
  immediate source library: HMC1NOT01
  immediate source clone: 009424
tgtttaaaaaacaaaaaaggcaagatgggcttgagcgattcaagaggcaactaaaaataaaattaggacccagcaccttgtttgacacacagtttgaccttcgattttcctcccttaacttccctcttcccttaatatctgtatacaagtgttgcttcaaagtaccaaggtcagaaattgattcagtacggtttactaaagtcatgtggaataaagccattggaaacaaatggaaagcctgtcgggacttctgggctcagaaccagctggctcacgcactccacttgtcagctggacttctgccttgtgaaatggaagcagcctttgttcctttctggctgagcaagctcctgaggctgggagagactaggaaggcttggtaggaggggaaaaaagtcaggaaaagatatcaaatcagaaacatggaagaagaagggaaccgatttgagttggtgggcaaaactctaaaaatctaaatctgatgcttatgtaagggttgagcgaattagggagattgctagtggaaattggagggaatttcgttttgcatcatttgtctaggatctatgcaaatatagctccactaaaggaccatagggaagagccagccttgccttttcttatatgattttgtttacaaaattttactgggacttttaaatctagctatagagttgggaaaaaatatttccacttagatattttacatggttttgtttaaaattaccattacttgttttttaaaaacacatgaccacatatgtatatgtatatctacctaaacattgtatcatggtttcagtatgttattcatgtgttactgggagatgctaccaagaaaccaacccaaagaaaattctgaaaaatacatttctatttatagaataaatgtttcatttatataaaagcaaaagaacttagagttctaataaatgggatgtctaataaattatgaagttactgatttgaatatattatatttttataacttccttgccaaagtcctgatttagtacattagagaacctgtgtttcctctctcctctaccattcatctctcttccatacagtcatttgggctttttactcaaagagaatcaagaaataataagatataacaagcttggcaaagtgttggctttttnnnnnnnnnnnnnnnnaatctctagcagtttggtaatttagcagcatcatttatttggggattcttttatctgatttcaacagtgaaaaacatccctatgataaagcctaatgacccatttcacaaaagatggaatttgcccttcctagaaaatatgacggagaaaagtctgactcagagaaagtgagtctgaattttataaggggtagtaagaattggacaattcctttgcatatctgaacttggcaggtaccgttctaaatctgaaaccagggtgatagctcaaagttgccattcatccagaatagattgttttagaatgtagtgtttaagtgactgtttcattaatacacctacaccctttctttgaaagtttgcaacctaattgcatctaaaactatgaataagttctgtggtaaaatcttaaactatggaaaattacaaaaatgaatttttcttccctgaaatcagagcttacatgtgtgtttttttataacattttcagataaatgtattcaacatgtaatacagtattttaacattcacctcttattttatattgaaatgtattacagtattaaaactcagtgttcagtatttatttcactatgcattttatttagtaaaagccaggagaaatgtttaatccaatggtgccttactttgtgatttaaaaggaatcaacttttttttatgtctaagtagtagattatttgcatatttgtaaaaactgttaggtctttatattttaaagtgtaataccagttttgttattttagtagcagaaatgggatgattgttaaagttccccaaaaatgttggcatgaaattaatttttccctccttatagtcaaggaccgtagaggaagaaaaacttttttttcatatcatgcactatgtaaacagacacattttgctatctgtgtcatcaggatagtgtaagtggtagggtagagactaccctagacatctgcatctttgtaagttagccagacaataaagaaaagc

SEQ ID NO: 59 - DNA, 1313 bp; single-stranded, linear
  immediate source library: THP1PLB01
  immediate source clone: 010084
cctttctctgcctncatcatcctgtttgtgggccgagcctgggatgccatcacagaccccctggtgggcctctgcatcagcaaatccccctggacctgcctgggtcgncttatgccctggatcatcttcttcaaggccctgggcgtcattgcctacttcctcatctggttcgtgcccgacttcccacacggccagacctattggtacctgcttttctattgcctctttgaaacaatggtcacgtgtttccatgttccctactcggctctcaccatgttcatcagcaccgagcagactgagcgggattctgccaccgcctatcggatgactgtggaagtgctgggcacagtgctgggcacggcgatccagggacaaatcgtgggccaagcagacacgccttgtttccaggacctcaatagctctacagtagcttcacaaagtgccaaccatacacatggcaccacctcacacagggaaacggaaaaggcatacctgctggcagcgggggtcattgtctgtatctatataatctgtgctgtcatcctgatcctgggcgtgcgggagcagagagaaccctatgaagcccagcagtctgagccaatcgcctacttccggggcctacggctggtcatgagccacggcccatacatcaaacttattactggcttcctcttcacctccttggctttcatgctggtggaggggaactttgtcttgttttgcacctacaccttgggcttccgcaatgaattccagaatctactcctggccatcatgctctcggccactttaaccattcccatctggcagtggttcttgacccggtttggcaagaagacagctgtatatgtnnggatctcatcagnagtgccatttctcatcttggtggccctcatggagagtaacctcatcattacatatgcggtagtagtggcagctggcatcagtgtggcagctgccttcttactaccctggtccatgctgcctgatgtcattgacgacttccatctgaagcagccccacttccatggaaccgagcccatcttcttctccttctatgtcttcttcaccaagtttgcctctggagtgtcactgggcatttctaccctcagtctggactttgcagggtaccagacccgtggctgctcgcagccggaacgtgtcaagtttacactgaacatgctcgtgaccatggctcccatagttctcatcctgctgggcctgctgctcttcaaaatgtaccccattgatgaggagaggcggcggcagaataagaaggccctgcaggcactgagggacgaggccagcagtct

SEQ ID NO: 60 - DNA, 310 bp; single-stranded, linear
  immediate source library: THP1PLB01
  immediate source clone: 010297
gtgactgcatgcaacaatatgtccacaagtttgaacgagagcagatcaacggcgagcagctgctgcagatttcccatcaggacctggaggagctgggggtcacacggttcggacaccaggagcttgtgttggaggctgtggaccttctctgtgcactgaaattatggcctcgaaactgataacatgaagaacttggttctgaaactgagagcatcttcccacaatttacagaattacataagtagccgacgggaaaagtcccgcttacgatggcaacaacctcccgcanggcccccaaatgangttnctg

SEQ ID NO: 61 - DNA, 528 bp; single-stranded, linear
  immediate source library: THP1PLB01
  immediate source clone: 010383
gtttctagcaaagatagtaaaggcttagaaataaaatctgttttcttgagaaataaatttcagaccctggaaggaaaatagaacacttcataatgtataaaatcctctaagttggcaactgaatttttatcattgttttctatttttaaaataatcattgatttgtgtgatgtctacatcttttaacttctggttctgttataaagagtacatgtcacggttcataggcagtaacatttcagagaactgacatgaacaagtagtgaaaattgggcattaaatataaaaataacagttcttcataaacagaaggaaaataaggaaatagaaataccgacgagaaaggagagtccttgaaagagacccaaggaaaccctgaattcatacccacgtcaaatatgcacatatcctgagatgatgccactttgatgaatgtgcattagtctgatttatcatgtaccttaagagagccagatggggtatgtttttgtgctgtgatatggtatttatacaggtacaaatataagg

SEQ ID NO: 62 - DNA, 1539 bp; single-stranded, linear
  immediate source library: THP1PLB01
  immediate source clone: 010466
cagccgcgcattccagagccagcagcgcgtgcctggccgctcctgcgctctcccgcctcccggggctcggaggagccggggcacgttccaggagctgcctagggctgaggttccaggcctgggggtcgcttccagctgccagatcccgtgcagtcctggggaccctgagaagcaccgagccatccctgacccaggaactttccgcagactcgccgccatctgggagtgaagcaacatggatgcagtcagccaagtccccatggaagtcgtgcttcccaagcacatcctggatatctgggttattgtcctcatcatcctggccaccattgtcatcatgaccctcgttgttgctgtgcccagccactgcagtaatcatctatcgcatgcggactcatccgatccttagtggggctgtttgagagcctcccaagagggccgggtgagggatgaggacaggcatcctatccccagcctcttcctgtcttcagaaaagcagcaggagggactttggggcatggacctgagttctggttttgattctgccacgagccagctgtgtgaannnnnnnnnnnnnnnnnnnnnnnnnnnnnnnnnnnnnnnnnnnnnnnnnnnnnnnnnnnnnnnnnnnnccctttctacctcatagggatgtgagaaccacctgacttagtggatgtgaaagctgtttgtgatcagtaaagctaccacagatataagggtgttatgctgaatcctgagaagctttcaagaaccagagaacctgattgctgatgatggccttaaaggtggtgagggagatactgggggcagagcagactttgccagtgcccctcaggtcaaaccaagccaagagcaccctgtccccattccaaggggccagcagcactttggcccaaagtattttctttaaggtgccattccttcatgttttctcagtttggagggtgatgggtagagctttccagaaccttctccattccagaatctctgcccctgtgtaatctgaaaggaaggctgtgccatctttgggcactgccaagggagttggggtgatgggcttctttctgcactggagtctcacatctgttagctttgacactcaagcaatgttggaaaatgcagggtgactgagttccctgcccagctttcgggatctctggcccccatccccttgtgtgtgtccctctgcccagctcctgctgtaattagctccacgtgtacccccttcactccctcccaccagctctgcagccagcctatggcaattatattttaagaggtgttcccaggacttttgggacctactaaaacaatgatggttattttagatgtgatgatttatatttatgtagagatatttctggaccactcaagctcttcgataccaaaatcaggagcatcttgggatttattaaattatgtaagaagatagcacagatatcgggatattattgtgtgaaaatgctgcttttactttgatgtgatctcattgatgtacacaaccaagttccaataaagtgctagaatgtgaaaaaaaa

SEQ ID NO: 63 - DNA, 316 bp; single-stranded, linear
  immediate source library: THP1PLB01
  immediate source clone: 010470
catgactgtggcagtggatatggtagtcacagaggtggtggagcctgttcgctttctcctggagacagtagtccgtgtgtaccctgcaaatgagcgattttggtatttcagcagaaagactttcacagagactttcttcattgagattgaaacagtctgagggaaaaggccataccaatgctggagatgcaatatatgaggtggtgagtctacagcgagagtctgacaaggaggaaccagtcactccctactagtggagggggtccaatgtcaccccagggtgatgaagcagaagaggagagtnattaatgaactc

SEQ ID NO: 64 - DNA, 333 bp; single-stranded, linear
  immediate source library: THP1PLB01
  immediate source clone: 010479
gctggtggaggttggggaagaatataaacttcgagcagagaccctgtatctggctgtaaacttcctggacaggttcctttcatgtatgtctgttctgagagggaaactgcagctcgtaggaacagcagctatgcttttggcttcgaaatatgaagagatatatcctcctgaagtagacgtgtttgtctatatcaccgatgatacatacacaaaacggcaactgttaaaaatggaacacttgcttctaaaagtccctagcttttgatctgacagtaccaaccaccaacccagttttctcctttcagtactttgaggcgacaaggagtgtgcgtt

SEQ ID NO: 65 - DNA, 336 bp; single-stranded, linear
  immediate source library: THP1PLB01
  immediate source clone: 010484
gatcacttttgtgaacttgatgatgagagatctccagctgctcagtatgtagacctattgctgaacccagagcgttacactggctataaagggacctctgcatggagagtgtggaacagcatctatgaagagaactgtttcaagcctcgatctgtttatcgtcctttaaatcctctggcgcctagccgaggcgaagatgatggagaatcattctacacatggctagaaggtttgtgtctggagaaaagagtcttctataagcttatatcgggacttcatgctagcatcaatttacatctatgcgcaaatttatcttttgggaagaaacctggggta

SEQ ID NO: 66 - DNA, 969 bp; single-stranded, linear
  immediate source library: THP1PLB01
  immediate source clone: 010488
ccagagttagagccttgatcacggaacatcattgtgtgcagaagaatactgtacctagtactaagttcttttcatctttgatttttctttagcttcatcagtccttccttcctaatctctaatcccctgaagcctaacacagttcctaatgtgttttgccttaacctcttttctcttcccacattggtacttctggttggggctctctttacttactgcttaggcacatagtcaccttctctggactccctgcttccatgctttctccttcagtccattccgcaaactcttgtgatcttccaaaattagctcctgattagctttcacttcctgtagaagcaagaacaagctcctctgcttggtacttagtctgtgtccatgtgatccaaaattaccttcctattgcatttcctactcctttgctacgtgtattggacctctggccaaattacaaaagatgtactctttgttctctaaaaccacactaaagttttctgacttctttcacactctttatgataatcctctgcctgaaaggctattgccacctgtcaaaatcttcattattctttgcctctttcctgagcctcttgcttgaatgtgatttctttctccctgagacccataaggttcatcttatgggaccttaatttgtcttgcatggacatttgtgattctcattttctcaccattaaattaccttggagggtagggctgtggtttactcctgtctaaacccctgaagcctaacacagttcctggcacacaacaggtgttcaacagatattgtgctcattcaataaatatttactcgctttgtttaatggattccacccctgccttcctaggtgaccttggacaaattctcgaacccattcaccaaccacacaagtttgttgtgagtcataaatggataatgaatataaatgcgcattgaaaataaacataaaatgttacccacaaaaaaaa

SEQ ID NO: 67 - DNA, 1227 bp; single-stranded, linear
  immediate source library: THP1PLB01
  immediate source clone: 010507
ccgacagtgagcagggcaggcagactcaactaagcccggacctgtggtggcacactgggcaggaccctgcttcatctcgggttggtttatgggcttttactttggagcactctgtgtgaagctgtttggtggaacccatgcatctggtgtggtccgcattatgatggaaggatcttaaccagtcgagtggagtgtacattgtctgaatacaggatgcacaatgttgtcaatcctggaaatggtctttcttttttgtaagatatgtgaatgaagtgttggtgtcctcaccaagaggtggcacctaagggttctgaggaaataaatgtatagacccttatgtacagacctgtgtataaacaacttttgtatatacatataggatagcttttttgaactatacagctgtacataaaagtagctgatattagttaggcctgtgtcaacagtttggatttttttcacttgtacatttctcgagccgggaactacttcattgaaattctgacagatatagagtcctccaatcaagccctgtatccttttgaaggacatgacaatgtggatgcagaatttgtagaggaagcagctctgaaacacaccgcgatgcttttaggcttatgaaaaagaaaacgcaattggttctgctgctgccattttaatcttgctcattaaccttactcctttgagaattctttaacaatatttaaaattggtaacaaaaatagtttagccataattgtttagccatgtgagtttcaggttggtacacgttcagacagaactgctgtatcacattccaattttgaatagccagtgagcaatcaagtgtagagaaatgataaatggcctaagaaggcatacagtggcataaacgatgctcttcctagtagcttaataggccacaagctagtttctgttgcactctgaaataaaatatgctttaaaaatgtagggaacagtgcttagaaaagcaaaaactaggtgtgtcattgaaataataggcataaaaattaaatgttacataagaacactatttggaaagagggtccttttaaaaactgaatttgtactaaatcagatttgccatgtccagtacagaataatttgtacttagtatttgcagcagggtttgtctttgtgaattcagatgaaacatatttatttttttttatttataaaaggttgatttaggaatattttgtcagtcattaaaaaacctgaaaacat

SEQ ID NO: 68 - DNA, 521 bp; single-stranded, linear
  immediate source library: THP1PLB01
  immediate source clone: 010598
cccagggataaattggatataaacactaaatactaatcatttgaacttaacatttaataaaaagaaagggtgaaataaactgaagaccattttagaactagtcagttctctgcagcaaagggaacaggagccatttgaaccctctgggacccctcaccccactgcttcagggtgctaggctgagggatgtttttcctcccccttaccgcccatgccccttgaaagaaaagtcactttttgtggagggcatcattcattcctgattcacaaaccccaaaaacctctggtgggagataggaagatagggcgtgggcctggggcttaacctcaatcttgtgtctgcctcagtcttttctgactggccctgaagttgtcagtggctctttctgtccttcagcccctggaaggtgctccaggataacaaagaagggcaggttgaagcccctcatggaaggagctggctttgtggggctgcaaaggacttttaagtcctgcctgtactgaagttcacagcccacctg

SEQ ID NO: 69 - DNA, 1718 bp; single-stranded, linear
  immediate source library: THP1PLB01
  immediate source clone: 010699
ccgggnacctggctgcccaagcctcagaccgncctctgccactctntccagctgcagcctggacgagccctcacacacctgantntccacggcagtaaggaagccagccgggtaagagaggttgagtcacccatccccgaggtggctgcccctgtttgggaggcaggttctgcaaagcaagtgcnnnnnnnnnnnnnnnnnnnnnnnnnnnnnnnnnnntgngctccagcagcctgtttgggaagcagcagtctctccttcagatactgtgggactcatgctggagaggagccgcccactttccaggacctgtgaataagggctaatgatgagggttggtggggctctctgtggggcaaaaaggtggtatgggggttagcactggctctcgttctcaccggagaaggaagtgttctagtgtggtttaggaaacatgtggataaagggaaccatgaaaatgagaggaggaaagacatccagatcagctgttttgcctgttgctcagttgactctgattgcatcctgttttcctaattcccagactgttctgggcacggaagggaccctggatgtggagtcttcccctttggccctcctcactggcctctgggctagcccagagtcccttagcttgtacctcgtaacactcctgtgtgtctgtccagccttgcagtcatgtcaaggccagcaagctgatgtgactcttgccccatgcgagatatttatacctcaaacactggcctgtgagccctttccaagtcagtggagagccctgaaaggagcctcacttgaatccagctcagtgctctgggtggccccctgcaggtggcccctgaccctgcgttgcagcagggtccacctgtgagcaggcccgccctggggccttttcctggatgtgccctctctgagttctgtgctgtctcttggaggcagggcccangagaacaaagtgtggaggcctcggggantggcttttccagctctcatgccccgcagtgtggaacaaggcagaaaaggatcctaggaaataagtctcttggcggtccctgagagtcctgctgaaatccagccagtgttttttgtggtatgagaacaggcaaaaagagatgccccgagatagaaggggagccttgtgtttctttcctgcagacgtgagatgaacactggagtgggcagaggtggcccaggaccatggcacccttagagtgcagaagctggggggagaggctgcttcgaagggcaggactggggataatcagaacctgcctgtcacctcagggcatcactgaacaaacatttcctgatgggaactcctgcggcagagcccaggctggggaagtgaactacccagggcagcccctttgtggcccaggataatcaacactgttctctctgtaccatgagctcctccaggagattatttaagtgtattgtatcattggttttctgtgattgtcataacattgtttttgttatngttggtgctgttgttatttattattgtaatttcagtttgcctctactggagaatctcagcaggggtttcagcctgactgtctccctttctctaccagactctacctctgaatgtgctgggaacctcttggagcctgtcaggaactcctcactgtttaaatatttatttattgtgacaaatggagctggtttcctagatatgaatgatgtttgcaatccccattttcctgtttcagcatgtt

SEQ ID NO: 70 - DNA, 1431 bp; single-stranded, linear
  immediate source library: THP1PLB01
  immediate source clone: 010776
gggggcggactagaccggagccgcgagtccattttggggctgtgcttggcgcgtaccgtgcggtccctgtagttggaggacgggcggtcgcgcggcctttcccactagccggaggtcggagataagtacccgccgcccggctcctctcgggaaagcggggtggtcctcgaaccttcagcgagggtggggagttgcccagtagcctctagttcgttagtcaaaacgtgaaaaaaaaagacctgctttgccctggggnaatagtaaccctgccaaatacatcagcttgtaggagacagaggatgtgatggagctgcttgaagaagatctcacatgccctatttgttgtagtctgtttgatgatccacgggttttgccttgctcccacaacttctgcaaaaaatgcttagaaggtatcttagaagggagtgtgcggaattccttgtggagaccagctccattcaagtgtcctacatgccgtaaggaaacttcagctactggaattaatagcctgcaggttaattactccctgaagggtattgtggaaaagtataacaagatcaagatctctcccaaaatgccagtatgcaaaggacacttggggcagcctctcaacattttctgcctgactgatatgcagctgatttgtgggatctgtgctactcgtggggagcacaccaaacatgtcttctgttctattgaagatgcctatgctcaggaaagggatgcctttgagtccctcttccagagctttgagacctggcgtcggggagatgctctttctcgcttggataccttggaaactagtaagaggaaatccctacagttactgactaaagattcagataaagtgaaggaattttttgagaagttacaacacacactggatcaaaagaaggaatgaaattctgtctgactttgagaccatgaaacttgctgttatgcaagcatatgacccagagatcaacaaactcaacaccatcttgcaggagcaacggatggcctttaacattgctgaggctttcaaagatgtgtcagaacccattgtatttctgcaacagatgcaggagtttagagagaaaatcaaagtaatcaaggaaactcctttacctccctctaatttgcctgcaagccctttaatgaagaactttgataccagtcagtgggaagacataaaactagtcgatgtggataaactttctttgcctcaagacactggcacattcattagcaagattccctggagcttttataagttatttttgctaatccttctgcttggccttgtcattgtctttggtcctaccatgttcctagaatggtcattatttgatgacctggcaacttggaaaggctgtctttcaaacttcagttcctatctgactaaaacagccgatttcatagaacaatcagttttttactgggaacaggtga

SEQ ID NO: 71 - DNA, 382 bp; single-stranded, linear
  immediate source library: THP1PLB01
  immediate source clone: 010890
cttcctccatgaagcctttactgatcccctcagtgaaaagtaattgtgcctttgttttcccatacatagctacgtcgtttgtaccttcatttagtgcatgccctatgcagggagannnnnnnnnnnnnnnnnnnnnnnnnnnnnnnnnnnnnnnnnnnnnnnnnnnnnnnnnnnnnnnnnnnnnnnnnnnnnnnnnnnnnnnnnnnnnnnnnnnnnnnnnnnnnnnnnnnnnnnnnnnnnnnnnnnnnnnnnnnnnnaggcttgtggagggcattaagtgagntaatgtacgtgcagcccttaggaatagtgcctggacatagtatgtaatctgntattgncattttccccttgnttagnagggtttnactatcttccattg

SEQ ID NO: 72 - DNA, 283 bp; single-stranded, linear
  immediate source library: THP1PLB01
  immediate source clone: 010985
catggcccgagcaggcctgggttcttgctcctttgccagagttgatgactacttgcactagctgactgtgctggctggctctggctggccctccactggccccagggctggagctgccctgccctccataggcaactggtgcagggactgggaaaccatagacagagtccactcctcctgcctggcctttccccctctccctttccttccttncttcctttctctgcccaccaacccgatcagnctntttatatttcccctttaagngnagnnggctgtaaaa

SEQ ID NO: 73 - DNA, 483 bp; single-stranded, linear
  immediate source library: THP1PLB01
  immediate source clone: 011136
gaagaactaaaagaatttgcgcatgtgaatagagcagacagtcctcccaaagaggaacaaggaagaactatcctgttagactcagaagaaaactcataccttctgtttgatgatgaacaatttgttgtaaaagcatttcgcctctttcacagaattccctcatttgggttttcagtcgtggaaaagaaacgcccaggtaaactcaatgcacagaaacttaaagaccttggtgttccaccaggtcctgcctatgggaagctgaaaaatggaatttctgttgttctggaaaatggggttacaatttctccccaagatgtcttaaaaaagcctattgttggaagaaaaatctgcatattgggtgactgctctggggttgtgngggtgatggaggagtaaaactgtnnttttgaagcagacctgttgatccacgaagcaaccctggatgatgccagatggacaaagcaaaggagcatgcacagacac

SEQ ID NO: 74 - DNA, 365 bp; single-stranded, linear
  immediate source library: THP1PLB01
  immediate source clone: 011191
cttggggcagctttgtaagcagcttcgcaagccctgaaacttctggctggtagggatgccagctaaaccagatggcatcaaacagtgaaatacaggcctggctttcagacttgatgatacaccccctgaagactccattcctttggtctttccagaattagaccagcagctacagcccctgccgccttgtcatgactccgaggaatccatggaggtgttcaaacagcactgccaaatagcagaagaataccatgaggtcaaaaaggaaatcaccctgcttgagcaaaggaagaaggagctcattgccaagttagatcaggcagaaaaggtgaaggtggattcttntgagctggttngggaatttg

SEQ ID NO: 75 - DNA, 679 bp; single-stranded, linear
  immediate source library: THP1PLB01
  immediate source clone: 011353
aggcaagctaatctctgtagaatatggaacagaggaaaaaataaaaataccagtaatatctgtttattcaggtccactcagaagtggtaggaacatagaaagagtgtctttctacctaggattttccattgaaggccctctggcatatgatatagaagtaatttaagacaatacatcacctgtagttcaaatatgtttatttatatctttatgattttattctctctctctattctcatggcactttcataacattatggctaacctctaattacagattttgcttttgcctccctggaatgaattacaagcctttttaagatatgaaatatgcctacccgcagagcttggcacaaagtggagtcaatcttttaatgttttaaatatgcattttcagactcaaataattaagaagtttcattgatatccactggtcacatcataactgtctatagggcaataaaatctgtgttaaactcaattgcttttataagttttctaaattatttcttcactgtgacagcaaagatttaaataaggtgaatgtaaaagagaaagcttattggactcaaacccacaggtccacaccagagttctatttacctcatcttggtatcaataaaaacttatgtggaaggtaaatatattgttccccatccaccacataacactntcccca

SEQ ID NO: 76 - DNA, 2429 bp; single-stranded, linear
  immediate source library: THP1PLB01
  immediate source clone: 011633
ggctctccagcacagacgatggctacattgaccttcagggggcagaccgggccgttccagtgctgatcattggcattctggtgttcctacccggattttaccacctgcgcatcgcttactatgcatccaaaggctaccgtggttactcctatgatgacattccagactttgatgactagcacccaccccatagctgaggaggagtcacagtggaatgtcccagctttaagatatctagcagaaactaaagatatctagcagaaactatagctgaggactaaggaatctgcagcttgcagatgtttaagaaaataatgggccagatttttgggtccttcccaaagatgttaaagtggaacctacagttagcctatttagggaccaaagctcctacactgatcccgcctggggccggctgagtggcacttaagcgggccatgccatgcaaccttgggcgctgccaaccgtgggcgagctctgggtgtgcgggcggcctggcgcggcgctccggtaaggcgtgtgtgcggcagggcggggacagaaccgtcctctcgggctctgggcgtgtccgagaccgcgctccccgccgaaatcaagctccgagtcatccgtgtggggcatttcgtcccccctggcacagttggcctctttccagaagcccgttttgtttgttttacgtctaaaattcgcgtcggttcttatttctctccctggcaaggtctgaagacgggtaggagaataacctgtgtcagcgtgttatgatgccgtcccgtaccaacctggctactggaatccccagtagtaaagtgaaatattcaaggctctccagcacagacgatggctacattgaccttcagtttaagaaaacccctcctaagatcccttataaggccatcgcacttgccatgtgctctgatcccgcctggggccggctgagtggcacttaagcgggccatgccatgcaaccttgggcgctgccaaccgtgggcgagctctgggtgtgcgggcggcctggcgcggcgctccgctgtgtcagcgtgttatgatgccgtcccgtaccaacctggctactggaatccccagtagtaaagtgaaatattcaaggctctccagcacagacgatggctacattgaccttcagtttaagaaaacccctcctaagatcccttataaggccatcgcacttgccactgtgctgtttttgattggcgcctttctcattattataggctccctcctgctgtcaggctacatcagcaaagggggggcagaccgggccgttccagtgctgatcattggcattctggtgttcctacccggattttaccacctgcgcatcgcttactatgcatccaaaggctaccgtggttactcctatgatgacattccagactttgatgactagcacccaccccatagctgaggaggagtcacagtggaactgtcccagctttaagatatctagcagaaactatagctgaggactaaggaattctgcaagcttgcagatgtttaaggaaaattaatggccagattttttgggtccttcccaaagatgttaagtgaacctacagttagctaaattaggacaagctctatttttcatccctggggncctgacaagtttttccacaggaatatgtatcatggaagaatagaggttattctgtaatggaaaagtgttgcctgccaccaccctctgtagagctgagcatttcttttaaatagtcttcattgccaatttgttcttgtagcaaatggaacaatgtggtatggctaatttcttattattaagtagtttattttaaaaatatctgagtatattatcctgtacacttatccctaccttcatgttccagtggaagaccttagtaaaatcaaagatcagtgagttcatctgtaatattttttttacttgctttcttactgacagcaaccagggaattttttttatcctgcagagcaagttttcaaaaatgtaaatacttcctctgtttaacagtccttggaccattctgatcccagttcaacagtaggttggacagcatataatttgcatcattttgtcccttgtaaatcaagatgttctgcagattattcctttaacggccggacttttggctgtttcctaatgaaacatgtagtggttattatttagagtttatagccgtattgctagcaccttgtagtatgtcatcattctgctcatgattccaaggatcagcctggatgcctagaggactagatcaccttagtttgattctattttttagcttgcaaaaagtgacttatattccaaagaaattaaaatgttgaaatccaaatcctagaaataaaatgagttaacttcaaacanaanaanaagnangggannaaaanaaggggnanaagagnagaggnnngngggnnnaaccnnnnggangggggcc

SEQ ID NO: 77 - DNA, 386 bp; single-stranded, linear
  immediate source library: THP1PLB01
  immediate source clone: 011686
ggcttgataaatgctttataaactccctcaaacctttctttactgtttttttgttttgtcttgtttttgtttttgtttttgtttttgtttttgtttttcccttgtctcccctgggaaaatgggaaattttacagttggtaaatctaagccaaaattattttgaaataaaggaattctggatgtccagtttaggcctcgttttcttacgttaatctggggccttatcacccataatatggtgatnacttctctttctaaaaacatagtagctaggaaataagnaaaaagaattgtcttttcattcactttaagtaagntnggggataattnttaccatgtgccatcctgncagttttaacaaagngatttcacaggnaatntggggt

SEQ ID NO: 78 - DNA, 702 bp; single-stranded, linear
  immediate source library: THP1PLB01
  immediate source clone: 012092
atctcctagaagctgcggaaaaagcctcaagagctttcaaagnttccaaaggnaaactgatagtaaaaactatgaaaccgagaactngtcaccacagaagtcccagagacggtatgacatgtataacacagcttgtttcttgggtgaaatagaagttggtccttacactatccagattcttcagctcactccctttttccacaaagaaaatganttatccaaaaaacatatggtgcaatttttatcaggaaagtggaccattcctcctgatcccagaaatgaatgttatttggctcttagcaagttcacatcccacctaaaaaatttacaatcagatctgaaaaggtgctttgacttttttattgattatatggttcttctgaaaatgaggtatacccaaaaagaaattgcagaaatcatgttaagcaagaaagtcagtcgttgtttcaggaaatacacagaacttttctgtcatttggttccatgtcttattacaaagtaaagagagtcaattactccaggnggcgcattgcaggaaaaagctagaaggctctgagagcagataggttttcctggactcttggaatatcttaatccaaacctacaaagntgctaccaccatggaaagtatagtgaattgaattatgccctttcctacttgcnagcaanaacctcaaaaaaaggcccattggcaanatnggg

SEQ ID NO: 79 - DNA, 786 bp; single-stranded, linear
  immediate source library: THP1PLB01
  immediate source clone: 012364
ccacagccgtctttctctttgcctcagccacttccttccttggcctcaccctccccagtgcactgaagaaggtaaccgggtccagacccacgcggcgccagttctccggcgggaaggaaaaccgcgcagagaggcagcaatgaatgtggatcacgaggttaacctcttagtggaggaaattcatcgtttgggttcaaaaaatgctgatggaaagttaagccgtgaaattttggggtcctcttccgtgatgataaatgtgccaacctctttgaagcattggtaggaactcttaaagctgcaaaaacgaaggaagattgtaacatatccaggagagctgcttctgcaaggtgttcatgatgatgttgacattatattactgcaagattaatgtggtttacatatctttatgtactgccattttttgtttctggtaaactggaatataaagtgaaagaacaaacatttgaacatacttaatgtatttttatagaactttgtaaacgaaaggagattcatgttttagaagtctgtccttttttatatcttgaaagaaaatctatgtatgatgctataaaataaatcctattatttttctcaggaatctggttaggaattgcaggcaatgagattttttgcggggcagggatgggaatgtttgttcataaataattagacattttctatagatatttgacattctgcgaaagcaacaagcaaactgaagaccaactcctatgagaaatattatgatgtttatgtaataaagacatgtaactgtcttaaaaa

SEQ ID NO: 80 - DNA, 1499 bp; single-stranded, linear
  immediate source library: THP1PLB01
  immediate source clone: 013321
aagaggatgaatttatcatcttggcttgtgatgggatctgggaagttatgagtaatgaggactctgtgaatatgttaaatctaggcttgaggtatctgatgacctggaaaatgtgtgcaattgggtagtggacacttgtttacacaaggggnagtcgagaaaacatgagtattgtactagttgcttttcaaaatgctcccaaggtctcagatgaagcggtgaaaaaagattcagagttggataagcacttggaatcacgggttgaagagattatgggagaagtctggcgaggaaggaatgcctgatcttgcccatgtcatgcgcatcttgtctgcagaaaatatcccaaatttgcctcctgggggaggtcttgctggcaagcgtaatgttattgaagctgtttatagtagactgaatccacatagagaaagtgatggggcctccgatgaagcagaggaaagtggatcacagggaaaattggtggaagctctcaggcaaatgagaattaatcataggggaaactaccgacaacttctggaggagatgctgactagttacaggctagctaaagtagagggagaagaaagccctgctgaaccagctgccacagctacttcttcgaacagtgatgctggaaacccagtgacaatgcaggaaagccatactgaatcagaaagtggtcttgctgaattagacagctctaatgaagatgcagggacaaagatgagtggtgaaaaaatatgactttcctttttggtaatatttttgtgatctttgatggtttttaacctaggaagtgtaatgtatgcatttatataactgttttgttatttgaatcttggaaaactagttttattatattcagatagccttgttttttaaaaaggcctttgcatacacctttatgagatagtgtaaaattgactatttatagtactatggatttaatgaaattatatgtcatttcacattgtatgccagaaattaggctaccaattatgaattaaagtcagtagttaaattaatactagatagaattagaaattttgattagagagattatgctatattatggaaaaacttgttaatgtagaattatactgcttcatattattttacctattagtacactcatagttagctttgtaataaatttatgttttctttaataattttagttcttcaaagaatggctgatgctggcctgtaatttttctttcaaggatgataatttgtgtgttgtttgatttgtttatattttacatctctgtagttttatttttagaagttgtgagatattggatgtgtggctatttttcctttctctgtattctttatgaaacataacttttgaaaaacctatgtattattcatacagctttggtttgtatattctgtatagcctaactacacacatcaaaatgtatgtcaaccaagtgtttagaatgaaattataagtgtttaagtccaaatanagcatgtgatgtggaataatcaaa

SEQ ID NO: 81 - DNA, 1471 bp; single-stranded, linear
  immediate source library: THP1PLB01
  immediate source clone: 013985
ccggtgctgccggcgctcaccatcaancctaccatcggccgagggcccatcccctaccagcgagggcgcctccgaggcaaacctggtggacctgcagaagaagctggaggagctggaacttgacgagcagcagaagaagcggctggaagcctttctcacccagaaagccaaggtcggcgaactcaaagacgatgacttcgaaaggatctcagagctgggcgcgggcaacggcggggtggtcaccaaagtccagcaacagaccctcgggcctcatcatggccaggaagctgatccaccttgagatcaagccggccatccggaaccagatcatccgcgagctgcaggtcctgcacgaatgcaactcgccgtacatcgtgggcttctacggggccttctacagtgacggggagatcagcatttgcatggaacacatggacggcggctccctggaccaggtgctgaaagaggccaagaggattcccgaggagatcctggggaaagtcagcatcgcggttctccggggcttggcgtacctccgagaggaagcaccagatcatgcaccgagatgtgaagccctccaacatcctcgtgaactctagaggggagatcaagctgtgtgacttcggggtgagcggccagctcatagactccatggccaactccttcgtgggcacgcgctcctacatggctccggagcggttgcagggcacacattactcggtgcagtcggacatctggagcatgggcctgtccctggtggagctggccgtcggaaggtaaccccatccccccgcccgacgccaaagagctggaggccatctttggccggcccgtggtcgacggggaagaaggagagcctcacagcatctcgcctcggccgaggccccccgggcgccccgtcagcggtcacgggatggatagccggcctgccatggccatctttgaactcctggactatattgtgaacgagccacctcctaagctgcccaacggtgtgttcacccccgacttccaggagtttgtcaataaatgcctcatcaagaacccagcggaggggtcgggacctgaagatgctcacaaaccacaccttcatcaagcggtccgaggtggaagaagtggattttgccggctggttgtgtaaaaccctgcggctgaaccagcccggcacacccacgcgcaccgccgtgtgacagtggccgggctccctgcgtcccgctggtgacctgcccaccgtccctgtccatgccccgcccttccagctgaggacaggctggcgcctccacccaccctcctgcctcacccctgcggagagcaccgtggcggggcgacagcgcatgcaggaacgggggtctcctctcctgcccgtcctggccggggtgcctctggggacgggcgacgctgctgtgtgtggtctcagaggctctgcttccttaggttacaaaacaaaacagggagagaaaaagcaaaccgc

SEQ ID NO: 82 - DNA, 276 bp; single-stranded, linear
  immediate source library: THP1PLB01
  immediate source clone: 014021
gtgaaaataaatagccatttaaaacataggcctttatcaacatttagttctttcaattaggaaatggagaatgaatgtttgagtttttaaggggaattaattgaatgatattttatcatttaagatgaaatcataacactagacacatagttgtatgttttaggaggaaatttagtttttctatctgtgcttctcatgaataggagcacttcttgagtactctggggtgatttaagccctttcccaccaactgtagtccgtttgctttattaatat

SEQ ID NO: 83 - DNA, 929 bp; single-stranded, linear
  immediate source library: THP1PLB01
  immediate source clone: 014046
gcgtccgcttttaaaagattattcaagatgaatttaaaagtcaacccttcacacagtttccctactgtatgtaggaatccaggtgctgaaaccaagtgtttcttttcccatgctctttgttaaaccccaattatagataatttttccagtcttaagctctgtccaccttcaagtcaattcataaccaagtttttgaacgctgctatgaattgcactgtgaaaagcactcttccctctcagttttcttttcatcccagccatgtttatcagatccttaagaacattgtatttcagtcttttacatcagtctgaattttggaaaagaatgcaatagttgtactccacagtcagtggaactgttccctgagtccgaggctcatgtgtcattctggcactacatttgcttaaattgctattttggcaacagcacagaaaactaatatttttaagcagagaatcttggcaatgagtgagagatgttaatttcacagaagcacaactcccaacccaacccttaggaaaagccctcttccatcgttacagtgctcagtgaatattaatttagttctgcttaagtggttgctatacaaactttgaatagccacctaataaataaaccttgcatgacaaacctgcaaaatattttatcagctgttattggaaagtgattttaagcaattgcttcctcagtgtcagggcacatgtgaatttccacaccaaacagagcatgaggaaccagttgacatgctgggttgtgactggcagctttagcagcctcggtactgaagccacaccagtgtccggatggaagtctgcatctgaggttgctcagtgtcccggtcattcatttacacattttaacttgcattaaagagctgttcttttctgtggcctagactcttttcactgatctcaaaataaactggttt

SEQ ID NO: 84 - DNA, 1358 bp; single-stranded, linear
  immediate source library: THP1PLB01
  immediate source clone: 014308
gcaactttnagtntgtntnataacgacgtcactgcttttaaaactcgataactctttatttaagtaaaatncccaggagtcctggaagctacgcgggacttgcagaggtttnnttttttggccttagaatctncagaaatnaggaggcaccgagcccagcgcagagcctcggacccggattgcttttncnttagcggatatntttatacagatgantataaaatngttttttcttatgggcttttngctcntttttttcccccccctttntaaacccnccccttttccccnncccctancccccaanaaaagcngncttcctgacnacccggagctgagcgccaagctgctgcggcgcgcagacctcaaccagnncatcggcgagccccantcgcccagccgccgcgtcttcaacccctacaccgagttcaangagttctccaggaagcagatcaaggacatggagaanatgttcaagcagtatgatgccgggcgggacggcttcatcgacctgatggagctaaaactcatgatggagaaacttggggcccctcagacccacctgggcctgaaaaacatgatcaaggaggtggatgaggactttgacagcaagctgagcttccgggagttcctcctgatcttccgcaaggcggcggccggggagcttcaggaggacagcgggctgtgcgtgctggcccgcctctctgagatcgacgtctccagtgagggtgtcaagggggccaagagcttctttgaggccaaggtccaggccatcaacgtgtccagccgcttcgaggaggagatcaaggcagagcaggaggaaaggaagaagcaggcggaggagatgaagcagcggaaagcggccttcaaggagctgcagtccacctttaagtagcgggggctgcagccgaccgccctgctccggccccagtgtgggtgggcgagggtggcgcatgggcaggcccgagcctgaatccttgcctgtgtctgacgggaccactactaaaaacctaaaaatatctgtgaatggagcaagttcaggggtcttatggaggtggcccgncccctccccgctcccttccactctgcacgaggccgccacaccggcgctggctccctgcccggcccggccctccctggcaatccctgggctctcttgcacccctaactngagccctgcctgctccggcactgccccaggcccagctcctggccctaggtccctcccagccccatgtggcctgcngcctgcactccacacatccctgtncccccaacccgggaacccctgcctcctcagaggcgcacgcccctggggcccctgccagcccttccagntggagcggagagagtagata

SEQ ID NO: 85 - DNA, 1742 bp; single-stranded, linear
  immediate source library: THP1PLB01
  immediate source clone: 014571
attcccctcctcacgccagcctaggagaagaagttcgtagtcccagaggtgaggcaggaggcggcagtttctggcgggtgagggcggagctgaagtgacagcggaggcggaagcaacggtcggtggggcggagaagggggctggccccaggaggaggaggaaacccttccgagaaaacagcaacaagctgagctgcttgtgacagaggggaacaagatggcggcgccgaagggggagcctctgggtgaggacccaactggggctcccgccgctgctgctgctgaccatggccttggccggaggtttcggggaccgcttcggctgaagcatttgactcggtcttgggtgatacggcgtcttgccaaccgggcctgtcagttgacctaccccttgcacacctaccctaagggaagaggagttgtacgcatgtcagagaggtttcaaggctgttttcaaatttgtcaagtttctggatgatggaatttgacttaaatcgaactaaattggaatgtgaatctgcatgtacagaagcatattcccaatctgatgagcaatatgctttgccaacttggtttgccagaatcagctgccattcgctgaactgagacaagaacaacttatgtccctgatgccaaaaatgcacctactctttcctctaactctggtgaggtcattctggagtgacatgatggactccgcacagagcttcataacctctttcatgggctttttatcttcaagccgatgacggaaaaatagttatattccagtctaagccagaaatccagtacgcaccacatttggagcaggagcctacaaatttgagaggaatcatctctaagcaaaatgtcctcagatctgcaaatgaggaaattcacaagcgcacaggaattttcttgaagtatggagaaagtgatggctttttaagatgcctctctcttaactctgggtggattttaactacaactcttgtcctctcggtgatggtattgctttgggatttgttgtgcaactgttgctacagctgtggagcagtatgttccctctgagaagctgagtatctatggtgacttggagtttatgaatgaacaaaagctaaacagatatccagcttcttctcttgtggttgttagatctaaaactgaagatcatgaagaagcagggcctctacctacaaaagtgaatcttgctcattctgaaatttaagcatttttcttttaaaagacaagtgtaatagacatctaaaattccactcctcatagagcttttaaaatggtttcattggatataggccttaagaaatcactataaaatgcaaataaagttactcaaatctgtgaagactgtatttgctataactttattggtattgtttttgtagtaatttaagaggtggatgtttggggattgtattattattttactaatatctgtagctattttgttttttgctttggttattgtttttttcccttttcttagctatgagctgatcattgctccttctcacctcctgccatgatactgtcagttaccttagttaacaagctgaatatttagtagaaatgatgcttctgctcaggaatggcccacaaatctgtaatttgaaatttagcaggaaatgacctttaatgacactacattttcaggaactgaaatcattaaaattttatttgaataattatgtgctgaanaaaaannaaaaaaaaanaanaaaagnnnannaaaacanaacnagcaaa

SEQ ID NO: 86 - DNA, 2197 bp; single-stranded, linear
  immediate source library: THP1PLB01
  immediate source clone: 014617
gccccggccctggaagcgccccggcggactggcccgcggtgggctaggggcagggccggagccgcggcggcggagctgtggatccttcatgatgagagatttggggacacttctctctcctgtgtgtagttgatagtttggtggtgaagagatggctggacagtgtcaaaacctttctccaggaccttgccagaccttttctataggggaatcaaagactccatctggggtatttgtaccatctcaaagctagatgctcgaatccagcaaaagagagaggagcagcgtcgaagaagggcaagtagtgtcttggcacagagaagagcccagagtatagagcggaagcaagagagtgagccacgtattgttagtagaattttccagtgttgtgcttggaatggtggagtgttctggttcagtctcctcttgttttatcgagtatttattcctgtgcttcagtcggtaacagcccgaattatcggtgacccatcactacatggagatgtttggtcgtggctggaattcttcctcacgtcaattttcagtgctctttgggtgctccccttgtttgtgcttagcaaagtggtgaatgccatttggtttcaggatatagctgacctggcatttgaggtatcagggaggaagcctcacccattccctagtgtcagcaaaataattgctgacatgctcttcaaccttttgctgcaggctcttttcctcattcagggaatgtttgtgagtctctttcccatccatctttgtcgggtcagctgggttagtctcctgcatatgtcccttctctactcactgtactgctttgaatatcgttggttcaataaaggaattgaaatgcaccagcggttgtctaacatagaaaggaattggccttactactttgggtttggtttgcccttggcttttctcacagcaatgcagtcctcatatattatcagtggctgccttttctctatcctctttcctttattcattatcagcgccaatgaagcaaagacccctgggcaaagcatatctcttccagttgcgcctcttctccttggtggtcttcttaagcaacagactcttccacaagacagtctacctgccagtcggccctgagcagctctacttctgcagagaagttcccttcaccgcatccgtcgcctgccaaactgaaggctactgcaggtcactgagttgcctgccatccaaaggggatgggcgggattggaagaagctgtggcagctcttttccctgttcacctcccgcctgccagggaaggcaggacccgctctgccaagggccctctgcgtattcccttctctctgaggaattgaaatttttgtctctggtgcacgtaaggcagaatgttccctgacaccagtgtgtggatttttaacatcaccgtgagtctgaaaggaccacaggtttttctgcagctattttctagcatttgccagtccctgtgcctggactgattggaacactttgtttttctccctgtgccatttacccttccacctttccatcctgccttctaccacccttggatgaatggattttgtaattctagctgttgtattttgtgaatttgttaattttgttgtttttctgtgaaacacatacattggatatgggaggtaaaggagtgtcccagttgctcctggtcactccctttatagccattactgtcttgtttcttgtaactcaggttaggttttggtctctcttgctccactgcnnnnnnnnnnnnnnnnnnnnnnnngcctgaagagatgagataggaggaaagacctcacagccagatctgctgggttttgaggagtgattttctttcttccccttgaaggggaaaaagctattttcattggtacatttaaagtcccccaactatggggaggtaccaattctggacaagtgccactacaacaacactaaacctgaacttttcaactccgttggtggtgggaggcagcgggcagaaatttactgttggccactgccaggtctatttcatatttcaaaggaatattgggtgctgcatataggaactgaaggggtcaatgtattaaacctgtgattggttgttttcctgtcattttgagagactaaatgtggggggcagatgtcaaaatacctgtacaattttaaaatgtcacaattaaacatgagctggtttcccacaaananaaaanaaag

SEQ ID NO: 87 - DNA, 619 bp; single-stranded, linear
  immediate source library: HUVELPB01
  immediate source clone: 015027
tagtggnnccccgggctgcaggaattcnggcacgagggaagctttaggataaggacatacctggtgttctgaatgtgtatatcccccaaagtctgcaatctcagctggaactggatggaccagtattccattacccagggccctggctcatggttctttccctcttctcagtttactgttggatttccctttcttgctattctctttctctccagacccctctcaattgccctttcctaaagacagaccttagcaagatgggccaggacttgggactttgtacgggnaccctgcagtcccaaagcccagcaatctactgcaccccatcttcaggactctatcccccaaacatgctggaaggcatcagcttatgagaacccacttttttctgcatgactagcttgtaaggaagaatctatggacaggatttccaagaaattcccactttttcaaaaaatgtatgtgacttatatttggcttcaatccaagagcaaactcagtggtgaacagctccatttctgtgcacatgttggtggaatctgcagaaatcgatgcaacatttctttcctgtctgggctgtttgtataattgtatataaatgtagcaataaatatattct

SEQ ID NO: 88 - DNA, 439 bp; single-stranded, linear
  immediate source library: HUVELPB01
  immediate source clone: 015221
gcatcccctggggcttcaagggcaatacccccgtgcttagggtttgccctgtgccctctgggtggggtggcctccccgcactcggcagcatggccaggctggccagggcgtgggcaggtggtgtcctgtggcacctccatcctcctgcccagccggctgtgtcacactcatctttttaaggtcaggttggttcctggcaaaaatgtacctccaggggcctccaagcataggatttggaagacaggaacggcacaggcgtccaggaaagcagctgcactcagacaatgccttctccattacttgaagcttcttttctgttcagccattaaagaaacttgacaaaataggaacaggggatatttctcaattgtaaacctttttgcagggncanttntgntccnagaggctttcaancttttcanttattttaaganggttt

SEQ ID NO: 89 - DNA, 814 bp; single-stranded, linear
  immediate source library: HUVELPB01
  immediate source clone: 015280
cagcgtgataagaggctggagtgggaaatgatgtgcagagtaaagccagatgttgtccaagacaaagagacagagagaaatcttcagagaattgcaacaaggggtgtggtgcaattatttaatgctgttcagaaacatcaaaagaatgttgatgaaaaggttaaggaagctggaagttctatgagaaagcgtgctaagttgatatcaactgtttccaagaaagatttcatcagtgttttgagagggatggatggaagtacaaatgagactgcttcaaagcaggaagaaaccaaaagccaaacagactgaagtgaaaatcagaagaaggcccaggttggacgatcctacgtgatgatttcatgaatgggagcatctatgaaagactgggacaaggaaagtgatgggccagatgacagcagaccagaatctgcaagtgactctgatacataaagcatcataggaaatacaattgcagtcgttttattttttctagaaaaatatgtcatcctctgatagttggggaattataaggataccatttgtaagaaagccaaaagacttttgccagatttcatatttccccttttcatgtacactttatatatacttcattaaaattatattttaaacccttgtataattttaagcattgttcctcagaacatttgtaaaaggatatatttctgcttgaccagcgagatgtgcattttgccaggatcatattggtcatgtctattggtgtattatttcagtatcaccaatgttttcagaaatacagtactaattcatcattaaactctttgaagttaatatt

SEQ ID NO: 90 - DNA, 1352 bp; single-stranded, linear
  immediate source library: HUVELPB01
  immediate source clone: 015290
gttttcctcttgtttaaaactgcctctttagatgtggatgccttaatgctgtaacacatttgaaaacattggcaatacttaagttgctgccatgattacagatggaattattggctaccaaagagacgcaattgatgatgagaagcatgattcttgcttccatataaccaaagttaatcttaattgcaatttgactccgtttccttggtagggatagactttcttcagattccaagtgctctcttaaatggcaaattaagttaaagaatactactgctccattcccctcacttattctccagttaattgcttgtcagttccatttcaagaaagcagtgatgttccaggtttgattcagttttcctgtgcacactattgccaaatttttttttagcaaaggattctgcactggaacgtagacagttggaaacagtactacctacctagaggttatgtgttttctctttctccccgctttcacctctttctttcccaattcaaaacagccaagtgagccctgttctggtattttgaatcattagagaaaagaaagggagtggctgttttgagttgtcctttctttgcagaaaggagaaaatgtgattgtgtttttttttttaccagcctacttctaagtgtcactgcctggtttttctctttttcaaggattagaactaagaggacacaccagcatcggagtgtattaagcccctgaaacacatggtagctagggactgaacacaggaaccgtatgacagcagcacaaacccccaaaggatgttcctgccttgtgggcccctgagccccttgggagactgagaatcatgaccagattcatccagaactgctgcagtgttaagtgaaaatcctctgtagttgttctgcagaggaaccttccttccattagaaaatttctgctcaatacagaatggtccacatcacccaaagtgcactgttggagatgctgtgaaattaaaacctctttgtacctgagacatctagattcacctcaggaggcctgtaaggaaatgtgtaacttgtgggaaagaactagacaaccatttaggaattctctagatatactcagcctaacccagtggcttaacacaaggagattggctttgaacctttttttcttgtggcatcttccagcaagttaggaagtctcatgggataagactgcagttcccctggttcaatagctggaacagtgattttaaatgtccctttttctggatcccttgtaaacatgaaatcattccatggatggctgccttataattttgtctctttccactttaattgtgaatggttaaaaaaatgctgttttctgatattaaatttttattagt

SEQ ID NO: 91 - DNA, 292 bp; single-stranded, linear
  immediate source library: HUVELPB01
  immediate source clone: 015295
gtaaaaccaaacccttccagtaaatacttgctataaggctattgcttgtcaattatcaaggcttctaaatatgttaaaacttgtcattttgattttncaaagataattttattatactgagctaccaatattcttaaagaaaactaaccaaagttaatattagtgtagtccattattatgtggacaattattatgtggaatctcttaagtgagcaactaagnaaaagccttatagaaagactacactggatttataagtgtgttttatgtttctctaagnatgggagcttct

SEQ ID NO: 92 - DNA, 1248 bp; single-stranded, linear
  immediate source library: HUVELPB01
  immediate source clone: 015350
tttagctagcaggaatttgacatttaaagagggaatcttctctacctctacaaaatcaacacttaacacttttttcaccttcagaattatttagaatgtggatttactttgtctagttttttcctttatagtgtaatttattgttactctctatttactgactaccagagatatacaaaatactgtgcaaaagattgttactgttcaaagagcttacaaactaaatttaaaagaatagcaagtctgaaaaatagaagatagtcaaatatttgtttatgctaagaactgtttttaattttcagctttgatgtaaattgctagcttaggtgtctttagttcaagcatgttaggaaatcctctttattcttaaatatagatacatgtctgcatatatgattgaattttagagccagaaagcatgtagagcagttgtgattagtagaaaatacactgacaagaagatatttgcatttatttcccaaagctgccagtaactagattttgtgacttaagtcatttaacctctccttgattagagcttcctgagccatgcacactggcactgcaattcacagacaggcctagatacagaccccctcaccccttgctacatccaaaggtggcctgggtggctggagcctctgggccagaaccacctttgtccattttcctcagtgtgcctacagcatcgctttccatgtgtgccataacttgggaatagttgggatgtgttgcttaactcctttacaccattagttatctgtaaagaccatctattccacactcttcattttttaaaaaagagacaataattatttttaactcactgaagtttaaaactacctagcatttctgattaaaaaaaatttagaaggaaaattttaatgcatttatttcagatggcgttttaaataggtacaaccctttggaaacacaatatggtactacatagcaagggctgtaaaaatgaccatatcctttgccccataaattctacttctatacttttaaccttaaaaataattcagaaaaaagataaatgcatgaagacatttatgtctgcattctttataataacaaaaattggggaaaaaaactccatgtcaagaaagtgggataagaaaaatagtgaagtattatactgccattaaaataattatttggaagactgtagaaacgtggacatgtttgatatggtaagtaaaatgagcacaatacaaaatagtatgcatactatgattgtgactt

SEQ ID NO: 93 - DNA, 919 bp; single-stranded, linear
  immediate source library: HUVELPB01
  immediate source clone: 015353
gagantttnctctagactattaggctagacagtctcatgattatnctaaccaaacctggagtaaagtggttgaaaaaaaagaaagtataanggggcttattaaagtggttaataaatatgntttaggttggtttttnatatgttttncttccaactntnatataagacactnctantgtanaatagtaggctatatgttggagatgtgnatagctatntctcacggcttnatactcagagantcaaatnntagtttgaaccctacctgananccaattacctttnaccanatgagaattttctctagactattaggctagacagtctcatgattatactaaccaaacctggagtaaagtggttgaaaaaaaagaaagtataaaggggcttattaaagtggttaataaatatgatttaggttggtttttgatatgtttttcttccaactgttatataagaaactactaatgtaaaatagtaggctataatgttgggatgtgtatagctaatgtcttcaaagactaatactcagagaatcaaattgtaggattgtacctatctgtgagcctatttctttagccagttttcctgtctactgccaagaaacagaattctctgcctcatggcaaatgcccctatcgtgtttacttttcgctctagatttttaaaaatgtgattgtgcccttgactgtaccaaagtgctgttgctataacagtgaacatttgtgaacagaggatgtttgtagtttcaaatgcagtacccatatgaccttgatcatattttagctatttaaaaattaagttggaggattttggcagaagtagtcacatgcatgattgctctgatagattggttggcgtgtgctgcagggggcttgtccttttaactctcccacaggatggatgtaggcagtgtcac

SEQ ID NO: 94 - DNA, 873 bp; single-stranded, linear
  immediate source library: HUVELPB01
  immediate source clone: 015407
ggtgtagactctgggattggagaaagtgtgcttgtctccagtggaactcacacagtaaatagtgaccgattacacacaccatcctcaaaaactttctctcctgccttctttagcttggtacagctctgtttgcaacaagatcctgagaaaaggccatcagcaagcagtttattgtcccatgttttcttcaaacagatgaaagaagaaagccaggattcaatactttcactgttgcctcctgcttataacaagccatcaatatcattgcctccagtgttaccttggactgagccagaatgtgattttcctgatgaaaaagactcatactgggaattctaggggctgccaaatcattttatgtcctatatacttggacactttctccttgctgctttttcttctgtatttctaggtacaaataccagaattatacttgaaaatacagttggtgcactggagaatctattatttaaaaccactctgttcaaaggggcaccagtttgtagtccctctgtttcgcacagagtactatgacaaggaaacatcagaattactaatctagctagtgtcatttattctggaatttttttctaagctgtgactaactctttttatctctcaatataatttttgagccagttaatttttttcagtattttgctgtcccttgggaatgggccctcagaggacagtgcttccaagtacatcttctcccagattctctggcctttttaatgagctattgttaaaccaacaggctagtttatcttacatcagacccttttctggtagagggaaaatgntncttntnttagctgatnncnnttggncanaacaccgggngctcntactngcgtcttagtcggatgcggt

SEQ ID NO: 95 - DNA, 285 bp; single-stranded, linear
  immediate source library: HUVELPB01
  immediate source clone: 015742
ggtcttgttagaggtgaagtttatccagggtaacttgctcactaactgtnccttttnatggcctggggttaaagggcgcatgnctcacactggtgaaaataaggaaggcctggtcttatctnntattaataanactngctgcattccaccaatccagngntttctatctncgaagnccttatnnaacactgaagngaaattttaggcagaaggnaanttgncccattncacaaggtctcttttnntatatcncnnttttaaatanaattttgctanaattacntt

SEQ ID NO: 96 - DNA, 309 bp; single-stranded, linear
  immediate source library: HUVELPB01
  immediate source clone: 015919
aggtccgacacctgccgcagaacagggagctctttctgacagctggaggcgccggcggccttcacctctggaagtatgaataccctattcagcggtcaaagaaagattctaagggaatagaaatgggagtcgcaggttctgtaagctttctgcagaatgttacgttgtccacccagcccattttcaagtttagattggagtccagataaaaggggtctctgcgtctgtagttcatttgaccaaacggtgagagtactgatcgttacaaagctcaataaaatttgacttcaagactttggacttgaggct

SEQ ID NO: 97 - DNA, 480 bp; single-stranded, linear
  immediate source library: HUVELPB01
  immediate source clone: 015936
aacaccaaatattgtcaagccctcacattggtcataatggaagcaaacatgacatatatggnctatataatcagtttgcgtgggctacagcaagatgttgcccaagagcctaggcatgagctggcttcctacggcctccaagcaggaaagaatggagctatacacagtcatctgaatatacagaagtgaaccctgggccagccacattcagccgtaacttccccagactgtttctacaggtgcagtgtgccaatcagaagaaaggtggccaggctcaggtgaaaggacaggagagtgactcttggcaggcttgctccattgtagagatgagatacaccaagatagtgacttnccagctttttctccccaaagcacccctaatagctgagaagaatctggaggcatagctaccatcacagctacactaaccaccatactttactgtatcctttcaggtgtctgtcctagctagttttattt

SEQ ID NO: 98 - DNA, 655 bp; single-stranded, linear
  immediate source library: HUVELPB01
  immediate source clone: 015937
gggaatgtttcatttattactgtttgattttcttgtatctggttctactcccaggatgaaattatccaactacatatatatttagaggaagaaagtgaaggggaaatttaaaatgtttacggcgcttaattgcctggaaatgaaatgaaatcaaatttatcagtttttttccccctaattacccaaaagatcttttgcaaactatgttacatgaatgcttctgcctctttaagacaaagaagaatgtcacccaaaattgtcatttttttcttaatggttcatcataaaagtcctaaaagagtaactgtaattggntgtttattgtttttatctaaagtaaggtgtatgtgtttgagacaagctggttttgttgataaagagatgttaaataattgtgaagccagatatgcaatgtgtatctaaaaagcaaggaatttgcagccgttttacaaatatctgtggaacatgtaaatactgtcaaatggaaaataaaataagttataatttttgtgaatttcatgggatgtcctatgattggaaaaattataactcttctgattctaatgtggaaattgttgtatttaatctgaaaatgactttacctacaacagttccattgtcagcacagcctaggagggtcagattcctgtattaa

SEQ ID NO: 99 - DNA, 1821 bp; single-stranded, linear
  immediate source library: HUVELPB01
  immediate source clone: 016270
ctgtgtggtgtccatctgaaccccctgcatacgcgtagtaatgtgatctccccactttcacataagatggtggccctgccttcagggaatgtgggagccaggtgggagccttcccggatatttaagctagaagattctacagggagattctccttggatcaatatatgtctctcagtcaaagatgtaaaagcacttttgccttaaaaagaatgttctgtttctaaatagagtcaacgttgtcctcctcattggaattcactatgagtcagaatcattagactgacttttttttttttccatagtaatagtattttgcagagtctcacagagctgcagatcttttgttcatcttgcagagttaacaagtctgatcctgttagtccagatttcttaaatttggccaagttataataggagcagtagcttgagacccgaagtcaggaaactttgacaatggatttttttttttttaatccagagacttgtactggaatttgccttaccctgtcagctcatggacttaaggtttcatcccgctttatgagtgcttctgaatccaagtcattgttacctgaatttgcaaattaagttgtgatattcgtgactgttaaattcctgtaattagattaacctctttgcttgcttgtntgtnttctctcctattttagcttaaagtatcagtggttgagaagagcttttcggacctgttactaccccaagctgtgtaatatacttgtataacaagaaataccttctatacaaaacctttttttcttacttttagatagaaatgtctactttttcagcagttctgtgaattaaagagcagagtgactgtgggtctggaatggctggtgtacttgggaatgtactatcaggattttacagcaatgctggggaaatgacagggaaaatgacaggaatgaatctcaccagattttttatgtactcagcagagccttgagttacggtgtttattttccaatcaagtgaagatatctcctacttctcctactggaacatctcagcttctgcagtgaagaaaaattcctgtgatagttcagttctttagtttttctatttgaaaaaaaaaaatcatttaaatgatcctttgttcacggctctccttaatgactgagtgaacagttcctatctgtatatttgactaaaccttttcctaagctatctctcatggttcctatgtttttttatcataattaaaagcaaaaccatctggatcacctaacagtcagaggtcagtatctcagcgtgtgaattatagaggaaatacagagagaacctcttccacttttacttttcgtccaaataaaatgcatggtgtaccagaagttgaagatcgggttgaggattggggctagctcgatggacactaaggccccaacatcgcgggacctgctgtggcgcgggatttttaggaacgctgttctagccggcccccctctccaggggtcgccgtggccggcattatttcctagttcttcttgtaacccttgaggttccagcgcggggagtgaggaggggtcagggggctaaggatgcaacctctgacgttctgcgccttcctaggagagtcttacatgtgttgagatttcacaagcaatgcgagttgtaaaataccagctctacaagaagctaggctctgtgacggcatagttttcagtagctttatcacaatattcacaatggagaattatatgacatggtagcagaaataggcccttttatgtgttgcttctattttacctcaaattgtagatatagggtaatcaataaaatccatccatgcctttcacacacta

SEQ ID NO: 100 - DNA, 673 bp; single-stranded, linear
  immediate source library: HUVELPB01
  immediate source clone: 016413
cagcctcccgcctccaagcacatcctgcctgcagagggtctggctagctgccttttcagctctcgagggatagagattntacaacctccctctgtcatcagttccagagccactcccctttgcactagtagttcttgctttcaaagaatgagggtgtnagggagggaggggtcaagaancaagagtnacaggggnaacaggcagaancaantnagggcaaaggcccccagntatgaagagttgtngaaggtngactttgggnangcaccctnacatcttnaaaattccnttnnttctnttaaaanttngnnnagnttccctccaaangccttttttgnaaanttttgcagcctcccgcctccaagcacatcctgcctgcagagggtctggctagctgccttttcagctctcgagggatagagattctacaacctccctctgtcatcagttccagagccactcccctttgcactagtagttcttgctttcaaagaatgagggtgtgagggagggaggggtcaagaaacagagtgacaggggaaacaggcagaacaagtcagggcaaaggaccccagcatgaagagttgtggaggtggaggtggggaagcagnctcacatctcacacttccttccttctcttaaatgtnagcagctnactccaaggctttgtttc

SEQ ID NO: 101 - DNA, 1550 bp; single-stranded, linear
  immediate source library: HUVELPB01
  immediate source clone: 018314
ctggagagcagctcagctcgctagctgcgcgcttcccggcacaggcagtgccactgcgcaggttgatcagcgaaacagcatccattttaatctgcggggagcccctgccttaccagggcgttctctccgcccgccggtggatgctccgcgcctgccctccgcagcctcgctcagcagtcctgcgttggggtccgcgccctaggatgcactgagatggtacatcaggataactgctcgtatcaggcacagaaaaatgagagagagtctatcagacagaagttggcacttggaagcttctttgatgatggcccaggaatttataccagctgtagcaaaagtgggaagccaagcctttcctcccgactgcagagtgggatgaacttgcagatatgctttgtcaacgacagtgggcagtgataaggacagtgatgctgatgacagtaagactgaaaccagcttggacacccccttgtctcccatgagcaaacagagttcttcctattctgatagagacactactgaagaggagtctgaatccttggatgacatggacttccttacaaggcaaaagaaattgcaagctgaagccaaaatggcccttgccatggccaaaccaatggccaaaatgcaagtagaaagtggagaaacagaacaggaaaaagtctcccgtcgctgatcttctgccacacatgcctcatataagtgaatgcttgatgaaaagaagtttaaaacccaccgacctgagagacatgactattgggcagctacaaagtgatagtcaaatgatctccattcccagatagaaagcttgaatgaaggagttggtccagctgcttctcatccgagatgagctgcacacagagcaggatgccatgctggtggacattgaagacttgaccagacatgctgaanacgttncnccaggcagaagcacatggcagagaaaatgcctgcaaagtgaaaagaagccattcaaccagagaacaagctagaatttattttgcttctgtggttgtaaaaatgctgttgctaaaggtggcgcagaaacaaatatcagtgttagtcattgataatgtctgaagcttaatgtccagtgattggcctttgcttcttaatttattttaattttttacttgtgccacttaatatcaggcattttaataaaatattgttacaaaaaatgtacagtactgacaccaccacaaatcatggttaataaaagagagtagttttaactttatttttatttgtttagagattttaagttggaacagtattttcccattgactacttttcattcttcactgtagttttaaagaagaactgtaaatgacggtgctatacaagtcaaaaaatacatgcctgcctcgtagtgaagttgtagctctccgtaatatgtatattttactcagttttcaacattttgtgaatgttgactacctgaagttcctttttagatgtgctattaacattctgttggattcagagggttccttgaaagttttatgtataaatatgtaaaataaaaattaaaactttgtttcatatc

SEQ ID NO: 102 - DNA, 1451 bp; single-stranded, linear
  immediate source library: HUVELPB01
  immediate source clone: 018977
ggggccaaggtacctttacaggagcacctagagcgagggcctttggcaaaaacaaaacaaccaacaaanctctccacagggccagctccttagggataagtggaaggatggaaattgcaattncaagaggggagtttncccaaaatgnatttatggggatacctngaagggagctttgggttgggggctntctttgacacttnaggaatctttggttggtgatcttatttnctngnttnaaagcttgnaagcangggtttccccanngccntttttcttccctgcctttcctttcccccattaatttcccacaggnncaaanctcggagggggggcttggcactggagcatctggggcttcgttcatccattcatcccgtatcaggggccaaggtacctttacaggagcacctagagcgagggcctttggcaaaaacaaaacaaccaacacacctctccacagggccagctccttagggataagtggaagatggaaattgcaattccaagagggagtgtgcccaaatgatttatggggatacctggaagggagcttggggtgggggctgtctgtgacacttaagcagtctgggtggttgtctgtttgtctgtcttcagtcttgaagcagggcttcccaatgcccttttcctccctgccttccttcccccattatttcccacaggccagcataattttgtttttcctaatttatagtcactgttctagacagacccaaagagaaggaccagtggtggagtctaggctgctgatcagtgaagctttacctcagcacctgagcacctttctcccctcccctctttcctcacccttttctagatgtaagacagaaagtaaatgtgactgggacttaaccaaggtcttggtaaagcctgcatggcaccgtaagaagctgaaaatactgttttgttcccgcaatcactgatttgaaaagttcccaacacaggcagctgctgtgtatatgggattagagccactcacatagaatagtctcttacagattttcataaatactagtcacaataagggtatttttcttgggggtggagtaagggggagactgatgctagtccttgttgtattttgttgggctgtccttgtgtattttcaccccagcctgtagtcctcctcacttcaaccccagggatttgtggggagcaagggtagccaatggcagagggggttggggctgggactctggaggctcctccccttctttctcttccttctgcctcccccgtgcccccagctgctcttgtcactgtctctgatgggtatttgcctggctttgttgcttntctancnnnanttngngtgaaaagatcccctgngnnggtgggttcgggaaaaaaaaaagtgnttttangggccccctnanacncggggattaaaagggatccaaccctncccccntttggaaaanttcttcccc

SEQ ID NO: 103 - DNA, 606 bp; single-stranded, linear
  immediate source library: HUVELPB01
  immediate source clone: 018989
aatttttgcagtcttttaaaacaccacacttctttnccatcttgaagaccagttaaaactacctctggccaaaaatgttagtgttactagatattatcaaggtgtgagactaaaaagttagaaggctttaagatgtaaatnatataagtnaatgttttctttccctaaaagttctgaccctngctgacccctcaatcaaatgttttttanttgaaaggggaaaggtaaatntcagaggnctttaaagatggccttttgtgacttttnactccaatttttgcagtcttttaaaacaccacacttcttttccatcttgaagaccagttaaaactacctctggccaaaaatgttagtgttactagatattatcaaggtgtgagactaaaaagttagaaggctttaagatgtaaattatataagttaatgttttctttccctaaaagttctgacccttgctgacccctcantcaaatgtttttaattgaaagggggaagaaaatatcagaggnccttaaagatggccttttgtgactttgactcaaaatcaaatgcatttcattaatgtatngggtcctaccaccttgcttncnttaangtggccatggt

SEQ ID NO: 104 - DNA, 1661 bp; single-stranded, linear
  immediate source library: HUVELPB01
  immediate source clone: 019095
gtcaaggaaactttgagggaaattttgagtcactggaccttgcggaatttgctaagnagcagccatggtggcgaaagtnttcgggcaggaatntggaccttcagcagaaaaagtatagcgtggcaaaccancttttcaattngaggtntcanctggntagntcacaggaattaaaattccanaaaggttttacaaatnttggattcaacaanctcannggnnnntannaattttttttaccatacaaancatannaaaaccaataagggagcctcacccccgggcacgctttctgcgcacgcgcatctcggtgcatctgttgggcgggaccgcggggcctgtgacaccgcacgctgagctctgtgatgtagccgcttgcggagactgcaagcagccgcggcgcgcccggccctccctcttccgctgccgccgtgggaatggcaaacatctgccccacgtgccggaagccaagtggtggcgacaactgcgcgccactccggggcctaccgcgcagatcattctacgtgtgtcctcgcgagacaagctcaccgaaatggccgcgtccagtcaaggaaactttgagggaaattttggagtcactggaccttgcggaatttgctaagaagcagccatggtggcgtaagctgtttcgggcaggaatctggaccttcagcagaaaagtatagcgtggcaacccagctgttcattggaggtgtcactggatggtgcacaggtttcatattccagaaggttggaaagttggctgcaacagctgtgggaggtggattttttctccttcagcttgcaaaccatactgggtacatcaaagttgactggcaacgagtggagaaggacatgaagaaagccaaagagcagctgaagatccgtaagagcaatcagatacctactgaggtcaggagcaaagctgaggaggtggtgtcatttgtgaagaagaatgttctagtaactgggggatttttcggaggctttctgcttggcatggcatcctaaggaagatgacctcatgttcattgttcctggttttttccagccagcagcctctacactccatcataggacatcgagtccctcctcctcttctcccatgccttcttccctgccatggcaaatctgagtggcttctctaagcatctgctggtacaagtcaatgtggcaccatgagcttcatggtggcagaagagacaatagtccttagctctcctcccagtacaccccctacttggccagtctgtaggccaacaagaaggttcctttacccccatgcaagacacttatgagaacacattacaagatggctgaccgtggaggatgagtggatcctgaaaggttgtcccaaactgttgatttggaaaagaaataagcacataggtaaccttattgtgtgctgcatggaaaggaactgaatacatttgcctttaagcatgaaagattttggtatcttggtgtctactttctgttttagttggttttacattacagaaagctatttaaatgtgttataattatgccgacaaaattggcagcataattactgtaattgaaaaatctgatattgtccaggnatgctttctaccgtacaggntaatgtatctcatggctgtttccaaagggtttatttattgtaaaacaagtgatttagg

SEQ ID NO: 105 - DNA, 2287 bp; single-stranded, linear
  immediate source library: HUVELPB01
  immediate source clone: 019674
ctcagatgcaggcagtctggcacctcagtctggattctaaccatttcactaagctatttttgtcttgtactactttgacccacccctgaataaacctcaattgctggagtggggtgtagttattaaagggatgctttttaccttttgctgtctgctgtggcagattccccagataaccaaggaaaaggggccacccatacctggaaataggccatagggcccctactactgccaacaagccatggcctaccttgacaattgtttgancttaaaattgtgtcttggtaacaaaagatttggacaggcatatctgtagctttcaagttaattaattgcaatatttttttcttcaggattttagctgctgaacaactttcagtttggagctaaaagagacctgtctcatggtctgcccttccctggggcaatagctagggtctttcctgatttttatggaattttaggggatattttgaacttgggttctccagtagtgaattgagacttggaggtgacttttcatgtttggagtatcatctctgtctgggctctgggctgacaaattaaaacctagagtagtgcttatgctgaaatgatacttttcattttttggttgatttttttgccttcccttcaattttaaactgaagcattttaatgtgggtagaaactctacaccaaatacactaaacattttggtgcttagtggatttctctttaggtaactggtacttacttccaaagactgaatacaagccacactccatcatatcccttaaacttcatgaaaaaccattcaagatccccttgctgcaacactgttctcttcttctctactaaattctatttccaaaattggtaatagagcggctaaggatccccagtacccagccctctgcctggcacaaagtggtagcacaattaaattcagtatgggtggagcatggtacagtcttggtgccatagaaggagtagttgcatagtcacacatcatttgataagttggatgttccattacatagaggaacacaaaattccagggtttttggaggaagggattagatagtgactaagccgccagaattgaggtggccattcctttttgtataggctaagaaacaggttatcagtgaaaaggtaattatggctttggcactagaatagcactgttgcaaagtatttaagcaccccccatctcagccctttattttatctttcatgtgggctaatgtgaggataatcttacagatattataggaatttcttttctatctttatgaaaacaacgtatataaaatatatctagaaaacctttgtttgagactcttatttaatgggcttttgattctaatgataattgtacctttatctttcaaaagctgatatttcctacctaagcatctcccgagaaaaatatctcattaaaaagcccataaataataggggagaagaaagccttaggtatcaattccaaaacagtgattgaaatttcccaaaataattatggcttctgtcatctccagagataatctggcttggtttaccccataatctaatttcagaaaagaaagctttattttaacactcatctgaatcaacattaaagccttttctctcaaagcgtttattgagaaactcaaatgaatatactttttgaattactgtcatcaaaagtgtacgggcttcctgtgctgcttgtgtcaaatggaacctgccctctaaagcactttctttcctttacttgcgtggtttcatgtaagctgtgctgtttagaaacaacatctcagactttacaaagaaatgacaaagaaggcaattgcactttttaagggatatcgacaagcagtttctgttttctaaaggacaaaatacagagtgtgtgtcatttttaattagattctttcccctgctgagttggaaattccagtgcagcactgattgaccacagttgccaatctaaaagcacaaagacagaagtaaagctttatgctaattttatttcaatatgatagaaaatttatcttggtatgtccttttttagataactccagcaggaaactgtaactgctatgtctttaggaaaatgtagaagaaagaacattattgttctttaattcctacaaggtactcgaaaaccttaagtgaaaaagatttctatctttttatcttagcgcatttatggaaaaaatattaactatcctgaatattttataattttgtaggaaaaatatgcatctattttttcttgacttcttttatatagtaataaaagttattttggaagctc

SEQ ID NO: 106 - DNA, 837 bp; single-stranded, linear
  immediate source library: HUVELPB01
  immediate source clone: 019794
cagctgccttagcgtttttgagtcaggagagccgaacgcgggccgggggtgtcgggggcctacgggtcccggccccggtcactatggacagttttttcttcggctgtgagctctccggccacacccgctccttcacctttaaggtagaggaagaggatgatgcggagacgtgctggcactaaccatgctctgcctcaccgagggagccaaagacgagtgtaatgtggtagaagttgtggcccggaaccatgaccatcaggagatcgcagtccctgtggccaacctcaagctgtcctgccaacccatgctcagtctggatgacttccagctccaaccacctgtaaccttccgcctgaagtcgggctctggccctgtgcggatcactgggcggcaccagattgttacgatgagcaatgatgttttctaaggaggagagccaggaagaggaagaggacagtgatgaggaagaagttgagctgtgccccatccttcctgccaaaaagcaggggggcaggccctagccctcctaggtcagctccatgtgccatgcaccgccatgcaccctgttccctgacaagtttcaacaattgtaaatatttcttccttgaagaggagagcttgggtggnggtnnggtgggagggacttgggtctttggtgctaggagagggcctgtgctccacacagccgtggttttctgattttcaccatgcccggggcctcccttcccacctgcctgtgagaattggaggttagtgcctgaagctcagagctacacatttttaatagtttttacatttttggataaaggttgaaataaagtggtgtggagtttttgc

SEQ ID NO: 107 - DNA, 1034 bp; single-stranded, linear
  immediate source library: ADENINB01
  immediate source clone: 020293
gctcgagcggctcgagcagagctcaagtctgaactctacctccagacagaatgaagttcatctcgacatctctgcttctcatgctgctggtcagcagcctctctccagtccaaggtgttctggaggtctattacacaagcttgaggtgtagatgtgtccaagagagctcagtcttttatccctagacgattcattgatcgaattcaaatcttgccccgtgggaattggttgtccaagaaaagaaatcatagtctggaagaagaacaagtcaattgtgtgtgtggaccctcaagctgaatggatacaaagaatgatggaagtattgagaaaaagaagttcttcaactctaccagttccagtgtttaagagaaagattccctgatgctgatatttccactaagaacacctgcattcttccctcatccctgctctggattttagttttgtgcttagttaaatcttttccaggaaaaagaacttccccatacaaataagcatgagactatgtaaaaataaccttgcagaagctgatggggcaaactcaagcttcttcactcacagcaccctatatacacttggagtttgcattcttattcatcagggaggaaagtttctttgaaaatagttattcagttataagtaatacaggattattttgattatatacttgttgtttaatgtttaaaatttcttagaaaacaatggaatgagaatttaagcctcaaatttgaacatgtggcttgaattaagaagaaaattatggcatatattaaaagcaggcttctatgaaagactcaaaaagctgcctgggaggcagatggaacttgagcctgtcaagaggcaaaggaatccatgtagtagatatcctctgcttaaaaactcactacggaggagaattaagtcctacttttaaagaatttctttataaaatttactgtctaagattaatagcattcgaagatccccagacttcatagaatactcagggaaagcatttaaagggtgatgtacacatgtatcctttcacacatttg

SEQ ID NO: 108 - DNA, 304 bp; single-stranded, linear
  immediate source library: ADENINB01
  immediate source clone: 020370
agattgtccataataaacataaacggaatcaatctagaaaatgtatttttttccaaatgatacttttatacaaagaatttgctaaaattccaagagctgtgtgctgtattaactactttttgtgtaatatttcatttaatcttccccaaaggagcagccttgtaagtgaagcagttagtatcttcattttacagatgaaggtaccaaggtttaagggcaattcacgatttttcctacaatacaaaataattgatggagcccggctgcaaacccaggcaaaatgtcaatccagtgctctttntct

SEQ ID NO: 109 - DNA, 716 bp; single-stranded, linear
  immediate source library: ADENINB01
  immediate source clone: 020386
ctagaatttcacagctcgctttggaacatattccaattcaaccagttaaaatcagaggaccaagtcgtgggggaggggggcggtgttgaggagaggtatttttaaagatctggcaacttttcaggattatttgtggagaactctaaggttaagatcaggaaataaaagactgtgtgtgtgngtgtgtgcgtgtatgtgtgcaagtgcctaaatcttgtttacctatcactttaaaaaaataattgaagtgtaagctaaataaaatgcttggagttttgcctgggctagtgagagttggtgcaaattcttgtgtgtgtttgcataggaaggtgagatgaccatctactaaagaggaagtagctaaatacagatctgtgggtgtttttaaaaaaaactcaacctatctggtgttttattttaatggataaaaatgtaatttttctaaggtagcaacttatttccaaattaatatagatgaaaaatagataccaattaggactaaattggaaagctttttgttctatatttggcatagcctttgaaatatttcttagtgcctaggaggtctggggattcctctttcgtggtggtcactaaccttacttgatgcagataaaatcacttgtcaatgcaaaatgtgttagaacttgataaagctttgagtttgagaaataaaggtatatttaaaatttaaataaaacttgtcatttatgctc

SEQ ID NO: 110 - DNA, 516 bp; single-stranded, linear
  immediate source library: ADENINB01
  immediate source clone: 020478
tagggacgagagacctgcattctagcccttgtttctgtcacttgctctgtacacttagacaacagcttgacctcttgagctttagtttcctcctctgcataatgagaggattagactactgaattgtatgggaaaaaaatacaaattcctgggtccctaggccatgcctgctgaaatccgacctgttcaggaagaggcctaggaaatcttttgagggaatccccagggggaatcttcgtgaccagccaggtgtgaaatctgctaactggaagatctcaaagcttcccttcactttttgtgattttgtggtcatgtaacgttactgtattattctacgtaaatgtgggtacttggatgtttatcatactgtttctctgtgtttacatactaatttgtgtaagaaatgcattttagtctgtgtacctcaacctgctgtttgtttcctagaggtgttagtagtctttaaatacaagtaagacttaagaggntatttgatgttatttacctggntatttg

SEQ ID NO: 111 - DNA, 322 bp; single-stranded, linear
  immediate source library: ADENINB01
  immediate source clone: 020575
gagcagtgaagtcctttcaaagtttaatgtcactcttcagacaggtacagacataacacacttctaaaaggaacattctttatcattctgcacaaattaaaatacantgcaatantcaaaaagggnaacattatataatcgttacattagatgaagttttttgccatttcttcaggagaatggnccctttacgncttcattttntggaacctgtnncaagtgcagtgaaanaagccttgggacnttccaatgnggtcattttgagtccccatcccggnnaaaagggncnaatctttttnagtcccgngatngggggggggtt

SEQ ID NO: 112 - DNA, 1155 bp; single-stranded, linear
  immediate source library: ADENINB01
  immediate source clone: 020586
aaaccaagaaacctgcccctcacccaaaattgtttaaaaagagaccactcaagggagttcattatgccgtatggagatgtctgcagtcgcagcaaatcacattccagagaaggtctcgcgtaggtgaagacagccaggtgctttctctaagagatacagggtgggtgagagacaagccagggaggatcttaattcaagagaagaattcataccaagagctgaccaagaaggcagtaaattctgtgtacttgtagcagaagaaattggactaggaacttgcccaaagctttatcaaagaaaagcattgtgttcaatcttggtagaaacatgccagcaataagtgcttatgttccatagccatatcatgggcttctcacttttaaacctcctccaggggatgttctcagacatttcacaatccctctggggacattacagtagaagagaaacacatggaactgtaccagtgctttttgcccatgttcatcctaagctccggctttaggcagtgctttctgacctgggcggagtgaagacgctgctggtggctgaggccagtaacatggggcccctgcccagccaccctgaaggctgggtaggtccctcttttcaccaccagttttccacacctgtgtactctagattaacaaactctggataaacagatatttacatttttaaattcaggcctacacagagtagttttccttataagggagcatgtatcacttagcaagaaactaaaaatggcaaatgagtttttcatcctttaagaaaaaaatcagctttagaattctctgcggtcagttgtgtgcaatgcaacaaaactacctttcagtaaattacttagttatttatttcagtgttttgtttcttttgatactaagtttccctttcaataatgaatgatgtgaccaaccaaggagaatttgtttgttctgtactaaaattatattttacagttaggaattataaaaagcaagggagcatctttaaatgttttttgtttaagcgatgtcttccatccaaagtaagantaatactctcggaaggtccttttggtgtcatgtcacttgctgtatgtggcagccttacagtgccacacttgggtactgaaaaatcaataaaacgaaagttcatcatcccatggcccgt

SEQ ID NO: 113 - DNA, 1920 bp; single-stranded, linear
  immediate source library: ADENINB01
  immediate source clone: 020596
ggtcctgtcgcctcagagacttgtgctggagaccctctgtaaactcagtatccaggacaataatgtggacctgatcttggccactcctccatttagtcgtcaggagaaattctatgctacattagttaggtacgttggggatcgcaaaaacccagtctgtcgagaaatgtccatggcgcttttatcgaaccttgcccaaggggacgcactagcagcaagggccatagctgtgcagaaaggaagcattggaaacttgataagcttcctagaggatggggtcacgatggcccagtaccagcagagccagcacaacctcatgcacatgcagcccccgcccctggaaccacctagcgtagacatgatgtgcagggcggccaaggctttgctagccatggccagagtggacgaaaaccgctcggaattccttttgcacgagggccggttgctggatatctcgatatcagctgtcctgaactctctggttgcatctgtcatctgtgatgtactgtttcagattgggcagttatgacataagtttagaaggcaagcatgtgtgagtgaagattagagggtcacatataactggctgttttctgttcttgtttatccagcgtaggaagaaggaaaagaaaatctttgctcctctgccccattcactatttaccaattgggaattaaagaaataattaatttgaacagttatgaaattaatatntgctgtctgtgtgtataagtacatcctttggggttttttttttctcttttttttaaccaaagttgctgtctagtgcattcaaaggtcactttttgttcttcacagatctttttaatgttctttcccatgttgtattgcatttttgggggaagcaaattgactttaaagaaaaaagttgtggcaaaagatgctaagatgcgaaaatttcaccacactgagtcaaaaaggtgaaaaattatccatttcctatgcgttttactcctcagagaatgaaaaaaactgcatcccatcacccaaagttctgtgcaatagaaatttctacagatacaggtataggggctcaaggaggtatgtcggtcagtagtcaaaactatgaaatgatactggtttctccacaggaatatggttccattaggctgggagcaaaaacaatgttttttaagattgagaatacatacctgacaacgatccggaaactgctcctcaccactcccgtcatgcctgctgtcggcgtttgaccttccacgtgacagttcttcacaattcctttcatcattttttaaatattttttttactgcctatgggcctgtgatgtatataggaagttgtacattaaacataccctcatttttttnttttctttttttnttttttttagtacaaagttttagtttctttttcatgatgtggtaactacgaagtgatggtagatttaaataattttttatttttattttatatattttttcattagggccatatctccaaaaaaaganaganaaaatacaagaaacaanaacaaaaaaaaaagagggtaatgtacaagtttctgtatgtataaagtcatgctcgatttcaggagagcagctgatcacaatttgcttcatgaatcaaggtgtggaaatggttatatatggattgatttagaaaatggttaccagtacagtcaaaaaagagaaaatgaaaaaaatacaactaaaaggaagaaacacaacttcaaagatttttcagtgatgagaatccacatttgtatttcaagataatgtagtttaaaagaaaaaaaaaganaaanacttgatgtaaattcctccttttcctctggcttaatgaatatcatttattcagtataaaatctttatatgttccacatgttaagaataaatgtacattaaatcttgttaagcactgtgatgggggtncttga

SEQ ID NO: 114 - DNA, 302 bp; single-stranded, linear
  immediate source library: ADENINB01
  immediate source clone: 020696
attcctttgtccaaccacactcatctttcctccttggagaggcttcccttttcctctttctggccttttgccttatcaaagtcttttctgatgtactccactagatgtggttgacattccttcatctgcgtccttgtagcatttgtaacccacatgtatttgttattacttgttcaacatgaaccgtttccaccagtttgtaaacttgtgaattcttactcatggctatatccatactagcacatgggcttggcacacagtagatattcaaagagttgttgagtaagagnaagcaagaaggg

SEQ ID NO: 115 - DNA, 435 bp; single-stranded, linear
  immediate source library: ADENINB01
  immediate source clone: 020833
aagaaattgaggcccaggtcacacagcttgtaaggactggttcctcattagaacccaggccacctggtgccacagctcccacccttcactaccattgtctattttatgatgataatcatgcagtggaacgtttgtgcagccttaaacattgttttgtcagtttgccctatataaatattaatgtgaaggctgtagaatcatatgttgtggttccatgtttgtaaacatacatttacaccacagtattaactaatgataattacttttacattttaattactccataataactaatgataattacttccaaatggtaaggttgagtgatttgtaattttttcatctatttttgcagtatcttaaattgttcctncagtaagtgcatgtttcttttgttagattattgacaaatgaggtatacaatattttaaaata

SEQ ID NO: 116 - DNA, 372 bp; single-stranded, linear
  immediate source library: ADENINB01
  immediate source clone: 021517
cccggattctatatgtaaaagctaatatacaaaaaagcagattaaattacatgataaatgtagctgatcatcagtgtttaattgatttaattcctaaggcaatattaatgtgttttctaaagtcattcaggtaaggaagaattataaatcaggtaactggaccaacaaagggaacacatataaagctattatgcatgcatggagccgtttgaggctagttttttaaggccacaactccagacccctgatttagactgagataggaaacagatcttgaaaggatccttattttaatggtacatgnatatcatgttccnatacgnttaataattggtctctacggtttaatggtacatggntttccatggttcc

SEQ ID NO: 117 - DNA, 2190 bp; single-stranded, linear
  immediate source library: ADENINB01
  immediate source clone: 021671
cagctgaagagcgacaagccgcttggcagccgcggatctcaccgccgctcagggtttttagaacttcagccataaaaatgggcagaattttccttgatcatatcggtggtacccgtctgttttcttgtgcaaactgtgatacgatcctgaccaacccgttcagaactcatctccactcgtttcacaggcgccactggcagagcatttctttttaacaaggtagttaacctgcagtacagcgaagttcaagatcgggtcatgctcactggccgccacatggttcgagatgtgagctgcaaaaactgcaatagcaaactgggatggatctatgagtttgccactgaagacagccagcgatataaggaaggccgcgtgatcctggaacgtgctctagttcgagagagtgagggctttgaggagcatgtaccatctgataactcttgaagatacagagagaaatccatcttttcccaggtctccttcactgaaaacaaaaatctacttacatacactgtcaccttagcatcagagtcggattaatgaactgcggaacaagaggttgtgagaatctaagatggaacnnnnnnnnnnnnnnnnnnnnnnnnnnnnnnnntgtattttccatccaacagcagtgtgtagagagaatattatgcagatgccgttaaattttttaccctatgtttacatcttgaggcagcagagtctgtctgcagctatgtggtgagctatgtaaggaaaaaaatctgggctgttagagtgaaaaagtgtgttttatgtcaattgtgaaaggaaaatgttaggagtatggtttttaaacttgggcttcattttaaacttttttttttaaacccagttatttcacttgatttgctagcttcagagaagagatccgaatctgtgcccagcgctaaaggctcagtgttagcatggcttgtgctggccggtgtgccatattcttgttggagatgaaccgtagcaccagagcccattcttccttgtcagtcttggcccaaagatgtcaccattcctagttatttgtcaccacataattggtgttgattggaaactttttctgagatgggacagaactgctgggttgtctttttccatgtaacttaagcatagtaatataaataaagtaatagttggatgcttttggtcctgtgttgcttttaaaaacaccttataaaagaggagagtatttgataagcaattttcatagtagtaaagttttttttcatctcttaaactaaattgaccatgcatataatattctttgtttaaatgaaagcatactgttgaaacccgcagtgttgcatttagaaaacagttgaacagaatgtcaatgtgcattcatgcaaaaaaaacatttaatctgcatctgttttagaaaagggggaaatgaagcaacttgtctaaaaatactgctttacaaagcatttcagcctttccccctcagttttgcattgattttttgacaagtctgtagagcctaatagtttccatcaaaggcctagatctcttatttagcatttttttcagctcttctctcagaagttcagctgttgaaacgaaaactgtactttgtaccctcacatacaaagggatcaaatttgacctggtgttattttagccccaaatttatgacattacacaatattaaaatgtaaatgtttctttacccaaactacttctaggatattctagtatttgcttctggtggaattaaatgacggtaaaattggctaattatttgaatgaatgatggangggntggttttgcatgctcaatttctaggtcctttgtctagaaaggaaatttgcctcagttgaattagtgaaatatttctgtcgttgatattaaaagtgacttctgagtacagttaagttcctcctatttgccactgggctgttggttagaagcataggtaactgattaagtaggtatgatactgcatttgaaataagtggacacaaactatcctttctccaccatggactcaatctgagaacaacagcattcatttccattcattttccatactggcttttgattataatgcagattcctagtagcatgcttaccctacagcactatgtgcatttgctgtcacaataaagtatattttgtcttgcattgatgcagtactgctgcttattttccactgatcttgtctagtgatcatc

SEQ ID NO: 118 - DNA, 815 bp; single-stranded, linear
  immediate source library: ADENINB01
  immediate source clone: 022747
ctgaaattccacattcatataatggctgtgcaatacatgcttctcaataagaaaattaactgcatgtttactgtgtgctgatcacatcagatttttatgtttaaaaaaatctcattatggattgagtccagcccagctctaagagaaaaagaaggcccatatgggagacttcagtctccataattattgcctttatccagcagtgcttatgaaagccccctaccctgtcccattccagaaaccataagactcaggcagttcttgattctggaggcctgcctggtaagataagatagtataatttggaactgagaacataccagaaacagcagaacgagggccagagcagaaaaatgaaaataagtggagacacttatggatacattggtgcaaaaaaagccacggagcccatactgggcttgatatgactttgaggggacagcagattaatacttaatgagggttaaacctgaccagtctttctacagtgacaggccacactgcatgaatggggagaaccaatgaatccattgtcctctgcctattttcctgtgcacagtcacattccctccttaggaatcttccccttccaccctttacattaaacaagggaacactgaatctttcaagggaattacacgtttgggttaatgtttcagtatatcattttcatactgtaaattattttgtaagagagatttactgctatcccagggtgttcggacttggtgcccctgtgcatttggaaatcaataaactattactggaaatgccaaaaaaanaaanaanannnagannanangnnnannnnaaaa

SEQ ID NO: 119 - DNA, 1365 bp; single-stranded, linear
  immediate source library: ADENINB01
  immediate source clone: 023284
cctggccttcggctcctgcgtccccagaacccaagggaacgtcatggaggccacatggggccacccggctccctcgggatggctccgcctgcacttttgaaaccccggtttccttcaacgtccacattccagggtgaccacacggtgtctcctcctcctcatcttagcttccaggttcaccctaaccctgtactaacctgcttggtggacttggaaaagacttggctctgtcgggaaaggagagacggggcctccatcacgcctgttaccagaggatccccgagagccacaccagctctggacatcaccgcccctgggaactggggccaccagccctgggcacgagatttgctctgactttatttatatggcatgaaatctctggttttatttttggggatttttttgttgttgggtgttgtcaaagtttgtttttttctaaagttgtgtgattatatatttgacattttacatttcaaagaaaggtatgttgtctaacaggggaccaacagaaggtagtattgacaactgttcccgcttctactaaaaaaaaaaagagcacaaaagaaaaactaaattattgaaaaattaaaaaatgtcattgtttcctgtttgttaatattagggtttgtaaggtgtcgttttgaggtatcgactgtgattccttcccccaccctccattctccagcggttggccggtgttagaactcgctctctttgagtgactggctaccaagggcctgagaggtggccagccagggttggagctggaggggatggagccccacctgaggtgccatgtcacacgggttagagggtcacttgggaaacaacgggcggtggcttctgtgatttattttcttgatggtaacttctcagagcagggcgattgggacatcaccagccagagcacaggaagccaccctgcctgctggggaggagggacccacacaagccccctcggcagtttgtccccccagcttcggtatgccttcagggaaaggtcacagctggggaggaagcggggggacgcctgtcactcctggcaggtggtgagttcaggtgggggctccctgctgcccccaggcctgggagcttgaagccctcccggcatctggcatccgagcctcccgccctccagggtgcgcttccctctcttgccgcagcatacacgagggcaggcagtggccttgtcactgtatcttgcatcagagacaaaggaggacccgctttagccctgctgcgggaaatgggggagggcccagggccagcgcattgtgcactggtttactttaaaatgtacagattcttctcgttaaattcttgatagattttttattattattaaaagtcagtttataatac

SEQ ID NO: 120 - DNA, 969 bp; single-stranded, linear
  immediate source library: ADENINB01
  immediate source clone: 023381
cccatggataccaaagtacgactgtagttatctatttttaacatacttattattaccaccatgctcagtaagtccatttttgcatggaatatggagccttaaaacatgtcatgaatttggagtccctgggcacataaatctaccttcaaatcagaggtccttaatgatgcctaaacatacagtaaaattagaatcagaaatacttctttaaaaaatattcaaaatgtgtttgtttcccatgggattattctctatcccacacgaatgtaaaaaaatccacattaatgatccatttaagtatagttttattgggtccttttctaatgattaaaggttctttctcaatttcattcctcagtcctgcaagtaaggactcatactgaagagtactgaaacaaggacttcttgtcagaaacagcttctggaatcttgggttttgtttttgttttttgacaaaatacactattggccatgtccatcacgagagtgtttgtagtaattaattaccttgtacaggacctggcacttagtagcattcttcaaatgttccctcagtgatccttttactctccttgtcacttacttgggagaaataggggcacgtgagataagaagaagaataattttgatgttggtatgcttgccctgttacttatagacagtctttgtcataggcaaacttgaatttgatttaaaatagggctgggaaaaatattcaataactgtaagcccccttttggatgccaaacttaggagttttgtacattctctgatgaacaagcatttagatcataacatggtaaagcctattaccagccaatgttgttagcatctttgtatgcacatcactgtttgtgcaatatatgaatattttgttgcattgtattcttatataaaaataagtagagaacaaannnganntgnggannganagnaantaannngagagaaggaanagantgacagagg

SEQ ID NO: 121 - DNA, 1722 bp; single-stranded, linear
  immediate source library: ADENINB01
  immediate source clone: 024130
ctgaacccttcaaccggaaatcgatcaagggaacagagttcagaggcagcagaaactggagttagtgaaaatgaagagaaccctgtgaggattatttcagtcacacctgtaaagaatattgacccagtaaagaataaggaaattaattctgatcaggctacccagggcaacatcagcagtgaccgaggaaagaaaagaacagtaacagcagctggtgcagagaatatccaacaaaaaacagatgagaaagtagatgaatcgggacctcccgccccttccaaacccaggagaggacgtcgacccaagtctgaatctcagggcaatgctaccaaaaatgatgatctaaataaacctattaacaggggaaggaagagagctgcagtgggtcaggagagccctgggggtttggaagcaggtaatgccaaagcacccaaactgcaagatttagccaaaaaggcagcaccagcagaaagacaaattgacttacaaaggtaaaaatgcatttgcaaagggagaaaatgaaggccaaacagaagcaggctccagcttctgcaaaaacttggattcacaaatgtccctgaacagaaaatgaagctcacttcagtaacacacactctctgccttgaaaactaaagagactattacttccttttcacatgaccacaagtcctctgatggaaatgtacagcagaaactcttgagagagaggctaaaagcaactnttttctcccccttcccctagactttttttacgaaaagtcaataattaagcaaattgcttaacacttggttccagttcctgcctatctggagtttaaatgcgtaatacaccattaatttccacgctgcagtttttattttaaaggaagtaacaagatgtctttacactgacactgaaaattcatccattttagagccaggaattcccatgttacacaggaaaaaatagaagtctactgaattaattttttaaaagaaaagagatcagattaaatatttctttgtttttccttttggaaacttttatgtataattctttctgcctgcctacttttctgcaaaaatgagatgtacagatttcggttccctgctatgaaaagtgatgtggtagcaattttataaatgttgctttctgatttttatcagagtgagaaaattaaaattattgatttgcaagtagtaaacagttcatattttgatttcccctcattttagtttaatataatttgcaataaatgtacatattgttgtttgtttcataaagcatatcactttaaaatggtttttactcctgtgattatgttggaatatttggaattttaaaggagtaaagactgtccagcatttggttttataatgtttgtcaccagatttttattaatgtaaaaaaaaatcaatttttaaaaaatagttggactttggcagcttttaaggaaagttggaggtgttttaggattgctatcaattttcagcattgtgctatttggaaataagtgttttgcttttgtctgatggtctgggctcatttttatgtttattttagaaaactgttgcatcaatatattatgtttcttggcattgttcagcataggtaatgtgtgcactttatgtgtacacataatcatatttaagttttttgcataaaataaatgcttctagatgtcatggcagtctttttaatctttttatcatatgctttcttgtgaattttttcatgttaaa

SEQ ID NO: 122 - DNA, 878 bp; single-stranded, linear
  immediate source library: ADENINB01
  immediate source clone: 024704
tcatattccagctgaatgcaaaaggcaacactctgtggatcacagagtgtaacaatggacctaaatggactatagtatattggatgttaaatccatatatgatgtatattttgtaaaattgggaaaatcactaccttgtaaaatagtttatttgtatcatcaatattatttctgttacttgaatagtagatattcatcatcatgcttttgcacttgaatttgcaactgaatggattttaaaaaataattctttaatgggatcatgagcatgaaatgggatcctgcatcacttgttttaactatttattttgccatgtttacattttgtatcttgtaaaaataaatccaactttgtgtctaaaaagttaaagattcatagctaggaaatgaaattcttgtaatttttttctaaaggaactgtaaagttttcacttggttcattttgtttcacaatttgactagatggactttttggtaaatactttagtggcatttcactgtcaaatatgaagttcaaggcaaaatagtattttctattactgtgcaggggaaagggatggatcgatacatgcaaatttaatgtagtaactcacttttccatatattttgaatgtatatttctatttatgataccaatttataaaaaaataattaccacagaaaaaatggaataggaaaaattatgcatctagcacatttaaactgtgcaaatatgaaaatttttcgaggattacattttatctgaaggctgcatattttaactggctttaaaactgtaacacatcacataaaagatactttaccaggtatgtattgcattatatcattgcaataattattggaagtctagatatcgagccatcccaggtgtnnccgcg

SEQ ID NO: 123 - DNA, 981 bp; single-stranded, linear
  immediate source library: ADENINB01
  immediate source clone: 024741
tccctccggcgtcccgcgccctccttccttcctcgccaggacggacgcacttccggcggatgtgggggccagccctcggaaacggaagtgagcggcggggtcgactgacggtaacggggcagagaggctgttcgcagagctgcggaagatgaatgccagaggacttggatctgcagctaaaggacagtattccagttactgaactttcagcaagtggaccttttgaaagtcatgatcttcttcggaaaggtttttcttgtgtgaaaaatgaacttttgcctagtcatccccttggaattatcagaaaaaaaatttcccangctcaaccaagataaaaatgaatttttccacactgagaccacattcagggtctattttgctccgctaaaattacagatggaattcaaggcagtgcagcaggttcagcgtcttccatttctttcaagctcaaatctttcactggatgttttgaggggtaatgatgagactattggatttgaggatattcttaatgatccatcacaaagcgaagtcatgggagagccacacttgatggtggaatataaacttggtttactgtaatagtgtgctgttcatggaaaccgagggctgcatcttgtttatagtcatctttgtactgtaatttgatgtacacaacattaaaagtactgacacctgagaatttctgctcaagtagtatcagtgatcatttaaaatttggaggggtctttggtttacagccatgtggacaattaaaagcactaaagggagatcatgttaaagctcttaatttatattaaaacagtagcctttgtctttaaaaaagttgttgctcatgaatattataaaatgatctacaggtttcaattcaacctgtttctaggtttttttgtaaatttagttttgattaagcattataagcatttgagtctataaactttatagtagcatctttcagaataaacatttttaattganaac

SEQ ID NO: 124 - DNA, 1633 bp; single-stranded, linear
  immediate source library: SPLNFET01
  immediate source clone: 026498
atagggagcgatctccgagcgaggcggcaagatggacgcgggatttttccgcggaacaagtgcagaacaggataatcggttcagcaacaaacagaagaaactactgaagcagctgacaatttgcagaatgcctagaaaaaaaggtggacatgagcaaagtaaatttggaggttataaagccttggataacaaaaagagtaacggaaatccttgggtttgaagatgatgttgtgattgagtttatattcaaccagctggaagtgaagaatccagactccaaaatgatgcaaatcaacctgactggatttttgaatggaaaaaatgctcgagaatttatgggagaactgtggcccctgctgctaagtgcacaagaaaacatcgcgggaatcccttctgctttcctagaactgaagaaagaagaaataaaacaaagacagattgaacaagaaaaactggcatctatgaaaaagcaagatgaagacaaagataaaagagataaggaagaaaaagaaagcagcagagaaaaaagggagcggtctcgtagcccaagaagacgcaaatccagatctncttnccctagaagacggccttctcctagaagatactctcctccaatacagaggagatactctccttctccacctccaaagagaagaacggcttcacctcctccccctcctaaacgaagagcatcaccatctccaccaccaaagcggcgggtctcccattctccacctcccaaacaaagaagctccccagtcaccaagagacgttcaccttcattatcatccaagcataggaaagggtcttccccaagccgctctacccgggaggcccgatcaccacaaccaaacaaacggcattcgccctcaccacggcctcgagctcctcagacctcctcaagtcctccacccgttcgaagaggagcgtcgtcatcaccccaaagaaggcagtccccgtctccaagtactaggcccattaggagagtctccaggactccggaacctaaaaagataaaaaaggctgcttccccaagcccacagtctgtaagaagggtctcatcctcccgatctgtctccgggtctcctgagccagcagctaaaaagcccccagcacctccatcccccgtccagtctcagtcaccgtctacaaactggtcaccagctgtaccggtcaaaaaggccaaaagcccaacaccgagcccatcaccgccaagaaattcagatcaggtaggaggtggaaagaaaaagaagaaaaagaaggacaagaaacacaaaaaggataagaagcacaagaagcacaaaaaacacaagaaggaaaaggctgtggctgcagctgctgcagctgctgtgacccctgcagccattgcagctgccacaaccacattagcacaggaagagccagtggcagcgccagagccgaagaaggagactgaaagtgaagctgaagataaccttgatgatttagaaaagcacctgcgtttaaaaggccctgagatcaatgaggaaggcccaagtgtccccacagtcttagggggaaatgtttgttatgatgtaaaatttttattttggtttntacggantttcaattttcaaaatttgcttaaaaatggtgttttnaggtttttagntgt

SEQ ID NO: 125 - DNA, 2745 bp; single-stranded, linear
  immediate source library: SPLNFET01
  immediate source clone: 026618
aacctgcgacatcactttcgcctgcgtgtcggatcccaaggcggccaaggacctggtgctgggccccagtggtgtgctgcaagggatccgccctgggaagtgctacgtggacatgtcaacagtggacgctgacaccgtcactgagctggcccaggtgattgtgtccaggggggggcgctttctggaagcccccgtctcagggaatcagcagctgtctaatgacgggatgttggtgatcttagcggctggagacaggggcttatatgaggactgcagcagctgcttccaggcgatggggaagacctccttcttcctaggtgaagtgggcaatgcagccaagatgatgctgaccctggccccaggtgacaggccagtccccagcagacatcttggacatcctcaatcagggacagttggcaagcaatcttcctggaccagaaagtgccaaaatatcctgcaaggtaaacttttaagcctgatttctacctgaaatacattcagaaggatctccgcttagccattgcgctgggtgatgcggtcaaccatccgactcccatggcagctgcagcaaatgaggtgtacaaaagagccaaggcgctggaccagtccgacaacgatatgtccgccgtgtaccgagcctacatacactaagctgtcgacaccccgccctcacccctccaatcccccctctgaccccctcttcctcacatggggtcgggggcctgggagttcattctggaccagcccacctatctccatttccttttatacagactttgagacttgccatcagcacagcacacagcagcacccttcccctgaggccggtggggaggggacaagtgtcagcaggattggcgtgtgggaaagctcttgagctgggcactggccccccggacgaggtggctgtgtgttnnnnnnnnnnnnnnnnnnnnnnnnnnnnnnnnnnnnnnnnnnggctctcgccccaggatagaagctgcccagaaactgctgcctggctttttttcttccgagcttgtcttatctcaaaccccttccagtcaaggaactagaatcagcaacgagagttggaagccttcccacagcttcccccagagcgaagaggctgtagtcatgtccccatcccccactggattccctacaaggagaggccttgggcccagatgagccagtacagactccagacagaggggcccttggggccctccaacctcaggtgatgagctgagaaagatgttcacgtctaagcgtccagtgtgcacccagcgctccatagacgcctttgtgaactgaaaagagactggcagagtcccgagaagatggggccctggctttccagggagtgcagcaagcagccggcctgcaggtgagcatggaggcccggccctcaccgcctcgaagccatgccccagatgccactgccacagcgggcgctcgctcctccctaggctgttttagtatttggatttgcattccatcccttgggagggagtcctcagggccactagtgatgagccaagaggagtgggggttgggggcgctcctttctgtttccgttaggccacagactcttcacctggctctgaagagccactcttacctcgggtcccctcccagtggtcccaccttctccaccctgccctgccaagtcccctgcatgcccaccgctctccatcctccctcctctccctcttcctcccgtggagacagtatttctttctgtctgtccctttggcccagacccagcctgaccaacgatgagcatttcttaggctcagtcttgatacggaaacgagtgtcttcactccagccagcatcatggtcttcggtgcttcccgggcccggggtctgtcgggagggaagagaactgggcctgacctacctgaactgactggccctccgaggtgggtctgggacatcctagaggccctacatttgtccttggataggggaccggggggggcttggaatgttgcaaaaaaaaaagttacccaagggatgtcagttttttatccctctgcatgggttggattttccaaaatcataatttgcagaaggaaggccagcatttacgatgcaatatgtaattatatatagggtggccacactagggcggggtccttcccccctcacagctttggcccctttcagagattagaaactgggttagaggattgcagaagacgagtggggggagggcagggaagatgcctgtcgggtttttagcacagttcatttcactgggattttgaagcatttctgtctgaacacaaagcctgttctagtcctggcggaacacactgggggtgggggcgggggaagatgcggtaatgaaaccggttagtcaattttgtcttaatattgttgacaattctgtaaagttcctttttatgaatatttctgtttaagctatttcacctttcttttgaaatccttcccttttaaggagaaaatgtgacacttgtgaaaaagcttgtaagaaagcccctcccttttttctttaaacctttaaatgacaaatctaggtaattaaggttgtgaatttttatttttgctttgtttttaatgaacatttgtctttcagaataggattgtgtgataatgtttaaatggcaaaaacaaaacatgattttgtgcaattaaccaaagctactgcaagaaaaataaaacacttcttggtaacacaaaaaaaaaaaaaggccagtgcgaacgagtcgtgggcctgttagttgtgcattagca

SEQ ID NO: 126 - DNA, 2062 bp; single-stranded, linear
  immediate source library: SPLNFET01
  immediate source clone: 026722
ggtatgggccttttaggcttgggccagccagctttcttgagatgagtgaataaaagcgtattgtaatttcatgtctgcttcagatcatggggacagtgccacccaggaactgctgctgaggcctgggaagctcccttgccttcgggtttggagcagtggcatcatcccaccaacctgagccatgaaagggctgagcagaaagttaaatggtagtttcctgactggaagcaacacgtaggtcacttgagtagtcaggaagcacagtgggtgtggagccatcatctgtcttgggctggttcctcccaatctttgtccagtggtataaatggactgtctgctgatggccatacgcagcactggctgttaagatggggaaggggtacatcaggattccactcatagccctggttcgttattgttactcatggctctgacgtccccaagccctcttgaatgttgcaagcaatgttaaatatcacacctcggtctccttttgagcagcccaggtacctaaagcaaggtcaccaaacttgggtttaaacttcagttgccatcacagcagggttcaggttatgcagtttttgcagtgtggagttgaacgctgggtaaagaagggagagctgactctccattgcttttctagtggaaaccagccagtttgacggcacggtgcggatacaggactccatcaggctagtgttggggaaccagcccggcagccttccatgtgaattccaaagctgtttcaacactggctgataggcagacaaaaggttacttgtgtgtttctctgagaagcggtgtaaatgaagtcaccttagaatatattctgtgcggatgcttatattttgttaacttcacgacttatggcannnnnnnnnnnnnnnnnnnnnngtactaggtgcaaataacattatgaagtggtatttaattaaaaatccatgcagtgacaaagcgggggatgacgccacggacatggtggccgagaccggcggggtgggggacgtgtcgcgcggccgggtggcctcggtcggtaccctgggcgcggagcagctgcctcattagtattcgtacccacgaggcggcgcagggggccctcggggacagcgagcgtcgcgggccatggcttatcactcgggctacggagcccacggctccaagcacagggcccgggcagccccggatccccctcccctcttcgatgacacaagcggtggttattccagccagcccgggggatacccagccacaggagcagacgtggccttcagtgtcaaccacttgcttggggacccaatggccaatgtggctatggcctatggcagctccatcgcatcccatgggaaggacatggtgcacaaggagctgcaccgttttgtgtctgtgagcaaactcaagtatttttttgctgtggacacagcctacgtggccaagaagctagggctgctggtcttcccctacacacaccagaactgggaagtgcagtacagtcgtgatgctcctctgcccccccggcaagacctcaacgcccctgacctctatatccccacgatgggccttcattacttacgtgctcctggctgggatggcactggggcattcagaaaaggttctccccggaggtgctgggcctgtgtgcaagcacagcgctggtgtgggtggtgatggaggtgctggccctgctcctgggcctctacctggccaccgtgcgcagtgacctgagcacctttcacctgctggcctacagtggctacaaatacgtgggaatgatcctcagtgtgctcacggggctgctgttcggcagcgatggctactacgtggcgctggcctggacctcatcggcgctcatgtacttcattgtgcgctctttgcggacagcagccctgggccccgacagcatggggggccccgtcccccggcagcgtctccagctctacctgactctgggagctgcagccttccagcccctcatcatatactggctgactttccacctggtccggtgaccccctggccccagatggcactgagtttttcattcattgaagatttgatttccttg

SEQ ID NO: 127 - DNA, 1975 bp; single-stranded, linear
  immediate source library: SPLNFET01
  immediate source clone: 026905
gaaaaacgaaaatcgtgtgtgtttgaaaagaagaatgcaacttgtatattttgtattacctctttttttcaagtgatttaaatagttaatcatttaaccaaagaagatgtgtagtgccttaacaagcaatcctctgtcaaaatctgaggtatttgaaaataattatcctcttaaccttctcttcccagtgaactttatggaacatttaatttagtacaattaagtatattataaaaattgtaaaactactactttgttttagttagaacaaagctcaaaactactttagttaacttggtcatctgattttatattgccttatccaaagatggggaaagtaagtcctgaccaggtgttcccacatatgcctgttacagataactacattaggaattcattcttagcttcttcatctttgtgtggatgtgtatactttacgcatctttccttttgagtagagaaattatgtgtgtcatgtggtcttctgaaaatggaacaccattcttcagagcacacgtctagccctcagcaagacagttgtttctcctcctccttgcatatttcctactgaaatacagtgctgtctatgattgtttttgttttgttgttttttcgagatcacgcttgagactctgtctcaaaaaaaagtatctctaaatacaggattataatttctgcttgagtatggtgttaactaccttgtatttagaaagatttcagattcattccatctccttagttttcttttaaggtgacccatctgtgataaaaatatagcttagtgctaaaatcagtgtaacttatacatggcctaaaatgtttctacaaattagagtttgtcacttattccatttgtacctaagagaaaaataggctcagttagaaaaggactccctggccaagaaaaggactcccttagaatgggaaagaaaaatcataaaatattgagctgatgcctgtatatagaaattaagcgtttctcgaaagctgttctatgttttgctgttattttagtctttattctcttcctttaggtggagaaacaaagtaccaatttgaagggatttttttttattttgtcttttggtttctgtcagtagaaataaccatatgtgctaaccaaatttctgtgaagaatgttttcatggttatcattatatctaactataacctcccccatagttatgaagagtaacctgaaatgccactattgtggaaataggataattgtaattgtgaaaaaataattttaaggaaatcttacaagtattacattaaaaagatactatgactgccacctgccatttaccttctaataaccctgccatgtggtttgcagaaagagatggatatagtagcctcagaagaaatattttatgtgggttttttgtttttcgttactaggatttcatggatggaggggatatggttgaccttttactttttaatggagcagccagtttttgttaattactcacttgtaaattgtgagattctgaattccttacctgctattcttgtacttgtctcaggccaaatctatgctgtggttcttatgagacttgtatgaagatgccctgatttgtacagattgaccacgggaatactactgccatgtaatctgtatagttccagataatttgtcatgaacattgacagaatgacaattttttgtatttgctttttctccctttaagagcacattcttctgtaaggagaaaggcagcattctggctaaaatgtgtagaaggtaatttactacacttataaaatagtgtgacttttgtgaaaattttgaattagctttcatatgaagtgccttaagtagactcttcatttacttttctggtaatggtttaaatatcatttgttatgcatttttaagatacagttcagaatgacacattgtagtggcaaagataaccaaatgtctggctgtttgctttttgaccatatcaataaacttttacaatct

SEQ ID NO: 128 - DNA, 3099 bp; single-stranded, linear
  immediate source library: SPLNFET01
  immediate source clone: 027073
ccaaaatgttgagatcagagtcagttatccagaancnaanngccgaatntcggcacgagcctacagataatttattatgtatttttgaataaaaaacatttgtacattcctgatactgggtacaagagccatgtaccagtgtactgctttcaacttaaatcactgaggcatttttactactattctgttaaaatcaggattttagtgcttgccaccaccagatgagaagttaagcagcctttctgtggagagtgagaataattgtgtacaaagtagagaagtatccaattatgtgacaacctttgtgtaataaaaatttgtttaaagttaaaanaaaannaaanaaaaaaaaananaaaaaaagttttttttaagtgttagatgtttttgatattttaaaaaagcatctaggctgcttgtggaagtcagaccaaaatagcaggaaggtattgcagcaagatggatttgggaaaggaccaatctcatttgaagcaccatcagacacctgaccctcatcaagaagagaaccattctccagaagtcattggaacctggagtttgagaaacagagaactacttagaaaaagaaaagctgaagtgcatgaaaaggggaacatcacaatggctatttggagaacagaaaaaacgcaagcagcagagaacaggaaaaggaaatcgaagaggcagaaagagacaacaaaacacagaattgtnnggggcagattgcagggcccgggctgacgggaagtgggtgggagctgcctgcacacgcggtgccgcggggcgggagtagangcggagggaggggacacgggctcattgcggtgtgcgccctgcactctgtccctcactcgccgccgacgacctgtctcgccgagcgcacgccttgctgccgccccgcaggaaatgcttcggttacccacagtctttcgccagatgagaccggtgtccagggtactggctcctcatctcactcgggcttatgccaaagatgtaaaatttggtgcagatgcccgagccttaatgcttcaaggtgtagaccttttagccgatgctgtggccgttacaatggggccaaagggaagaacagtgattattgagcagagttggggaagtcccaaagtaacaaaagatggtgtgactgttgcaaagtcaaattggcttaaaagataaatacaaaaacattggggctaaaacttgttcaagatgttgccaataacacaaatgaagaagctggggatggcactaccactgctactgtactggcacgctctatagccaaggaaggcttcgagaagattagcaaaggtgctaatccagtggaaatcaggagaggtgtgatgttagctgttgatgctgtaattgctgaacttaaaaagcagtctaaacctgtgaccacccctgaagaaattgcacaggttgctacgatttctgcaaacggagacaaagaaattggcaatatcatctctgatgcaatgaaaaaagttggaagaaagggtgtcatcacagtaaaggatggaaaaacactgaatgatgaattagaaattattgaaggcatgaagtttgatcgaggctatatttctccatactttattaatacatcaaaaggtcagaaatgtgaattccaggatgcctatgttctgttgagtgaaaagaaaatttctagtatccagtccattgtacctgctcttgaaattgccaatgctcaccgtaagcctttggtcataatcgctgaagatgttgatggagaagctctaagtacactcgtcttgaaatagggctaaaggttggtcttcaggttgtggcagtcaaggctccagggtttggtgacaatagaaagaaccagcttaaagatatggctattgctactggtggtgcagtgtttggagaagagggattgaccctgaatcttgaagacgttcagcctcatgacttaggaaaagttggagaggtcattgtgacccaaagacgatgccatgctcttaaaaggaaaaggtgacaaggctcaaattgaaaaacgtattcaagaaatcattgagcagttagatgtcacaactagtgaatatgaaaaggaaaaactgaatgaacggcttgcaaaactttcagatggagtggctgtgctgaaggttggtgggacaagtgatgttgaagtgaatccaaaagaaagacagccgttacagatgcccttaatgctacaagagctgctgttgaagaaggcattgttttgggaggggggttgtgccctccttcgatgcattccagccttgggactcattgactccagctaatgaagatcaaaaaattggtatagaaattattaaaagaacactcaaaattccagcaatgaccattgctaagaatgcaggtgttgaaggatctttgatagttgagaaaattatgcaaagttcctcagaagttggttatgatgctatggctggagattttgtgaatatggtggaaaaaggaatcattgacccaacaaaggttgtgagaactgctttattggatgctgctggtgtggcctctctgttaactacagcagaagttgtagtcacagaaattcctaaagaagagaaggaccctggaatgggtgcaatgggtggaatgggaggtggtatgggaggtggcatgttctaactcctagactagtgctttacctttattaatgaactgtgacaggaagcccaaggcagtgttcctcaccaataacttcagagaagtcagttggagaaaatgaagaaaaaggctggctgaaaatcactataacccatcagttactggtttcagtttgacaaaatatataatggtttactgctgtcattgtccatgcctacagataatttattttgtatttttgaataaaaaacatttgtacattcctgatactgggtacaagagccatgtaccagtgtactgctttcaacttaaatcactgaggcatttttactactattctgttaaaatcaggattttagtgcttgccaccaccagatgagaagttaagcagcctttctgtggagagtgagaataattgtgtacaaagtagagaagtatccaattatgtgacaacctttgtgtaataaaaatttgtttaaagtt

SEQ ID NO: 129 - DNA, 240 bp; single-stranded, linear
  immediate source library: SPLNFET01
  immediate source clone: 027267
gggataagaaggtgatttttttattatttttatactgaatataaaaacatttgtaagggctctcaaagattcacacatgcctatattatcataagaatttttcagcacttaactactttgttggcattgatcctagtgtctttaaatacttcatgagcattcataattaaaatttatcttaagttctatgcagagtattaatgtaactagcataagtggttttcttcaggggaaataaaa

SEQ ID NO: 130 - DNA, 1652 bp; single-stranded, linear
  immediate source library: SPLNFET01
  immediate source clone: 027514
cggactctggaagagcgaaactaccgtctaaggtggggcgggcgacgcggtagacgggctggccacgcggctcgttcccccgctcctcggggccctccaaggtgtctccgtagtcagcaggttggaggcagaggagccgatggctggaggaagcccacaggcggatgttccccacttgcctagagggcatccctctggggtagcgacagacaatcccagaaacacgcataatacatttccgtccagcccggggcagtctgactgtcggtgccctcccaggaacggggaaggcctccgtctgtgtgaaagggcacagcacatcccaggtgcacccttcccaagtactcccaccccgcctactgtccatgcggcctncactgggggccataagcctcaccagcaaagcagatgagagcgtgggaactgtgttcnttcctccctgcccnctantgatttcagcccagcccctgccnagatcctaggtcccttttcctcccnagtttggctggcacgagagtagcccagcacatgaagcaggngatgttaagtcacaaggtgctgcttttcagatccactatgcaagangggagggtggggccacgtgaaaggcagctctagacatcaaccagtcctgggggaggggagtgggaaccgggcacaactaggaacaatgccaccattcccacaggagtggtacttaaaccagacagcagggttcagaggtggcacaccggggacaaagctgaggccctgcaccttcaacagctgactgccaggtgcctgtgggtgaactgaggggagtagagggagagggcaggtggaactggggcagaatctagtcatgccctaaagctagtcctgtaaacaatggtgccccagaaagctgcaggtggtgtttggagaagcagttacttttcagttacaagacccatctccctagtctcagccttacaacaccacgggactaaggaagagcacttccttgcctccgtaaggccagaggaagaaccatcccaatcatttgatctccagctccacagtagagagaaacctacaaaatgtcaaaccagcttcccgactcccaggagctcaagccaagcccagaggcagtggctggggtccctgcaggtcatgaggggcctatgcctttactccttttaaacaccagcacccgtcttttccccaacctaaaaccaaccaccagcatttcactacaggaccaaatggaaaccgagggaaccctgggtcttgggaagaacaacaggaaaccaaggtctgacctagggttccctcccagtcttcacatcactctggcctcatcaccaaggtgacagaggacacaggggagggggaaaacccacacacactccttggaatgggtcctgttatttatgcttgctgcacagacatattagaagaaaaaaaaaaagctttgtattattcttccacatatgctggctgctgtttacacaccctgccaatgccttagcactggagagctttttgcaatatgctggggaaaggggagggagggaatgaaagtgccaaagaaaacatgtttttaagaactcgggttttatacaatagaatgttttctagcagatgcctcttgttttaatatattaaaattttgcaaagccctttgagctaca

SEQ ID NO: 131 - DNA, 1207 bp; single-stranded, linear
  immediate source library: SPLNFET01
  immediate source clone: 027756
aaatccgcctcaaaggggagagccaggtgttcaagaaggcggtggtactgcatgtgcttccagaggagcccaaagagctcatggtccatgtgggtggattgattcagatgggatgtgttttccagagcacagaagtgaaacacgtgaccaaggtagaatggatattttcaggacggcgcgcaaaggaggagattgtatttcgttactaccacaaactcaggatgtctgcggagtactcccagagctggggccacttccagaatcgtgtgaacctggtgggggacattttccgcaatgacggttccatcatgcttcaaggagtgagggagtcagatggaggaaactacacctgcagtatccacctagggaacctggtgttcaagaaaaccattgtgctgcatgtcagcccggaagagcctcgaacactggtgaccccggcagccctgaggcctctggtcttgggtggtaatcagttggtgatcattgtgggaattgtctgtgccacaatcctgctgctccctgttctgatattgatcgtgaagaagacctgtggaaataagagttcagtgaattctacagtcttggtgaagaacacgaagaagactaatccagagataaaagaaaaaccctgccattttgaaagatgtgaaggggagaaacacatttactccccaataattgtacgggaggtgatcgaggaagaagaaccaagtgaaaaatcagaggccacctacatgaccatgcacccagtttggccttctctgaggtcagatcggaacaactcacttgaaaaaaagtcaggtgggggaatgccaaaaacacagcaagccttttgagaagaatggagagtcccttcatctcagcagcggtggagactctctcctgtgtgtgtcctgggccactctaccagtgatttcagactcccgctctcccagctgtcctcctgtctcattgtttggtcaatacactgaagatggagaatttggagcctggcagagagactggacagctctggaggaacaggcctgctgaggggaggggagcatggacttggcctctggagtgggacactggccctgggaaccaggctgagctgagtggcctcaaaccccccgttggatcagaccctcctgtgggcagggttcttagtggatgagttactgggaagaatcagagataaaaaccaacccaaatcattaaaaaaaaa

SEQ ID NO: 132 - DNA, 1448 bp; single-stranded, linear
  immediate source library: SPLNFET01
  immediate source clone: 027824
ctctctgtagacagggatccattttaaagagctacttagagaaataattttccacagttccaaacgataggctcaaacactagagctgctagtaaaaagaagaccagatgcttcacaganttatcattttttcaactggaataaaacaccaggtttgtttgtagatgtcttaggcaacactcagagcagatctcccttactgtcaggggatatggaacttcaaaggcccacatggcaagccaggtaacataaatgtgtgaaaaagtaaagataactaaaaaatttagaaaaataaatccagtatttgtaaagtgaataacttcatttctaattgtttaatttttaaaattctgatttttatatattgagtttaagcaaggcattcttacacgaggaagtgaagtaaattttagttcagacataaaatttcacttattaggaatatgtaacatgctaaaactttttttttttaaagngtactgagtcacaacatgttttagagcatccaagtaccatataatccaactatcatggtaaggccagaaatcttctaacctaccagagcctagatgagacaccgaattaacattaaaatttcagtaactgactgtccctcatgtccatggcctaccatcccttctgaccctggcttccagggacctatgtcttttaatactcactgtcacattgggcaaagttgcttctaatccttatttcccatgtgcacaagtctttttgtattccagcttcctgataacactgcttactgtggaatattcatttgacatctgtctcttttcatttcttttaactaccatgcccttgatatatcttttgcacctgctgaacttcatttctgtatcacctgacctctggatgccaaaacgtttattctgctttgtctgctgtagaattttagataaagctattaatggcaatatttttttgctaaacgtttttgttttttactgtcactagggcaataaaatttatactcaaccatataataacattttttaactactaaaggagtagtttttattttaaagtcttagcaatttctattacaacttttcttagacttaacacttatgataaatgactaacatagtaacagaatctttatgaaatatgaccttttctgaaaatacatacttttacatttctactttattgagacctattagatgtaagtgctagtagaatataagataaaagaggctgagaattaccatacaagggtattacaactgtaaaacaatttatctttgtttcattgttctgtcaataattgttaccaaagagataaaaataaaagcagaatgtatatcatcccatctgaaaaacactaattattgacatgtgcatctgtgcaataaacttaaaatgattattaaataatnaaatatatctacattgtttatattattgaataaagtatattttcc

SEQ ID NO: 133 - DNA, 1791 bp; single-stranded, linear
  immediate source library: SPLNFET01
  immediate source clone: 027971
attaaaacatgcaatgaaggagtgtttggaaaaatgcattgagcaaaatataacttccatttcctttcctgcccttgggactggaaacatggaaataaagaaggaaacagcagcagagattttgtttgatgaagttttaacatttgccaaagaccatgtaaaacaccagttaactgtaaaatttgtgatctttccaacagatttggagatatataaggctttcagttctgaaatggcaaagaggtccaagatgctgagtttgaacaattacagtgtcccccagtcaaccagagaggagaaaagagaaaatgggcttgaagctagatctcctgccatcaatctgatgggattcaacgtggaagagatgtgtgaggcccacgcatggatccaaagaatcctgagtctccagaaccaccacatcattgagaataatcatattctgtaccttgggagaaaggaacatgacattttgtctcagcttcagaaaacttcaagtgtctccatcacagaaattatcagcccaggnaggacagagttagagattgaaggagcccgggctgacctcattgaggtggttatgaacattgaagatatgctttgtaaagtacaggaggaaatggcaaggaaaaaggagcgaggcctttggcgctcgttaggacagtggactattcagcaacaaaaaacccaagacgaaatgaaagaaaatatcatatttctgaaatgtcctgtgcctccaactcaagagcttctagatcaaaagaaacagtttgaaaaatgtggtttgcaggttctaaaggtggagaagatagacaatgaggtccttatggctgcctttcaaagaaagaagaaaatgatggaagaaaaactgcacaggcaacctgtgagccataggctgtttcagcaagtcccataccagttctgcaatgtggtatgcagagttggctttcaaagaatgtactcgacaccttgcgatccaaaatacggagctggcatatacttcaccaagaacctcaaaaacctggcagagaaggccaagaaaatctctgctgcagataagctgatctatgtgtttgaggctgaagtactcacaggcttcttctgccagggacatccgttaaatattgttcccccaccactgagtcctggagctatagatggtcatgacagtgtggttgacaatgtctccagccctgaaacctttgttatttttagtggcatgcaggcctatacctcagtatttgtggacatgcacccagggaatatgtacagtcacaagattactcatcaggaccaatgagaccctttgcacagcatccttggaggggattcgcaagtggcagccctgttgattaatctctacatcattttaacagctggtatggccttaccttgggtgaactaaccaaataatgaccatcgatggctcaaagagtggcttgaatatatcccatgggttatctgtatggactgactgggttattgaaaggactagccacatactagcatcttagtgcctttatctgtctttatgtcttggggttggggtaggtagataccaaatgaaacactttcaggaccttccttcctcttgcagttgttctttaatctcctttactagaggagataaatattttgcatataatgaagaaatttttctagtatataacgcaggccttttattttctaaaatgatgatagtataaaaatgttaggataacagaatgattttagattttccagagaatattataaagtgctttaggtatgaaaataaatcatctttgtctgatt

SEQ ID NO: 134 - DNA, 215 bp; single-stranded, linear
  immediate source library: SPLNFET01
  immediate source clone: 028148
gccactcttaaagctgctatgtatgcatggnttgtattcatgcatcagtactcagtctccattttgtcccagtggtccatttgtctgtncttgcattactatcacttgcaacaaggtgacatgcccttgtccccgccccctcaattcgcctctctgctactgcccccacaacaaaacacaggngacctgagattttctaaaattttctgaatttt

SEQ ID NO: 135 - DNA, 500 bp; single-stranded, linear
  immediate source library: SPLNFET01
  immediate source clone: 028787
cggctcgaggagagattcacgcaccctcaagagtgtgggtgagacatatacagcctgttagacctgaaggcagatggctcttcttaaggccaataaggatctcatttccgcaggattgaaggagttcagcgttctgctgaatcagcaggtcttcaatgatcctctcgtctctgaagaagacatggtgactgtggtggaggactggatgaacttctacatcaactattacaggcagcaggtgacaggggagccccaagagcgagacaaggctctgcaggagcttcggcaagagctgaacactctggccaaccctttcctggccaagtacagggacttcctgaagtctcatgagctcccgagtcacccaccgccctcctcctagctcagggacccagcccctcctctctgagaaactctgaccttcatgtccttaggctgtgctcctgccactctaccctgacacctcaataaagaccagtgctggttttgttggaaaaaaa

SEQ ID NO: 136 - DNA, 1367 bp; single-stranded, linear
  immediate source library: SPLNFET01
  immediate source clone: 028971
cagaattgatactaactggaggcgaggagaactcaaatctcctaaggtgctgaaaggacatgatgatcatgtgatcacatgcttacagttttgtggtaaccgaatagttagtggttctgatgacaacactttaaaagtttggtcagcagtcacaggcaaatgtctgagaacattagtgggacatacaggtggagtatggtcatcacaaatgagagacaacatcatcattagtggatctacagatcggacactcaaagtgtggaatgcagagactggagaatgtatacacaccttatatgggcatacttccactgtgcgttgtatgcatcttcatgaaaaaagagttgttagcggttctcgagatgccactcttagggtttgggatattgagacaggccagtgtttacatgttttgatgggtcatgttgcagcagtccgctgtgttcaatatgatggcaggagggttgttagtggagcatatgattttatggtaaaggtgtgggatccagagactgaaacctgtctacacacgttgcaggggcatactaatagagtctattcattacagtttgatggtatccatgtggtgagtggatctcttgatacatcaatccgtgtttgggatgtggagacagggaattgcattcacacgttaacagggcaccagtcgttaacaagtggaatggaactcaaagacaatattcttgtctctgggaatgcagattctacagttaaaatctgggatatcaaaacaggacagtgtttacaaacattgcaaggtcccaacaagcatcagagtgctgtgacctgtttacagttcaacaagaactttgtaattaccagctcagatgatggaactgtaaaactatgggacttgaaaacgggtgaatttattcgaaacctagtcacattggagagtggggggagtgggggagttgtgtggcggatcagagcctcaaacacaaagctggtgtgtgcagttgggagtcggaatgggactgaagaaaccaagctgctggtgctggactttgatgtggacatgaagtgaagagcagaaaagatgaatttgtccaattgtgtagacgatatactccctgcccttccccctgcaaaaagaaaaaaagaaaagaaaaagaaaaaaatcccttgttctcagtggtgcaggatgttggcttagggcaacagattgaaaagacctacagactaagagggaaaagaagaagagatgacaaaccataactgacaagagaggcgtctgctgtctcatcacataaaaggcttcacttttgactgagggcagctttgcaaaatgagactttctaaatcaaaccaggtgcaattatttctttattttcttctccagtggt

SEQ ID NO: 137 - DNA, 418 bp; single-stranded, linear
  immediate source library: SPLNFET01
  immediate source clone: 029270
atcattgtatgtgcttcactacgggggggagaaggaaacgttagcatcatnattcccgtngtgagangnnnnnnnnnnnnnnnnnnnnnnnnnnnnnnnnntcgtgaatggntcantgccgttatcgaggaagtgtgttagttgtgggattgggtcctgataaaaggataagtttggcagatttcctttctctgtcttgcatacttccaccatgtcatgccttctgtcatgtcatgatgcagcaaggaggccctcaccagacagnnnnnnnnnnnnnnnnnnnnnnnnnnnnnnnnnnnnnnnnnnnnnnnnnnnnnnnnnnnnnnnnnnnnnnnttancccagtcagtaggtcatcttataatgtnccccntaaacattttgcagggtaaagaaattgagtnaggggnccaaanttc

SEQ ID NO: 138 - DNA, 670 bp; single-stranded, linear
  immediate source library: SPLNFET01
  immediate source clone: 029592
cacatcactcacaccttgcatttcacccctgcatcccagtcgccctgcagcctcacacagatcctgcacacacccagacagctggcgctcacacattcaccgttggcctgcctctgttcaccctccatggccctgctactggccctcagcctgctggttctctggacttccccagccccaactctgagtggcaccaatgatgctgaagactgctgcctgtctgtgacccagaaacccatccctgggtacatcgtgaggaacttccactaccttctcatcaaggatggctgcagggtgcctgctgtagtgttcaccacactgaggggccgccagctctgtgcacccccagaccagccctgggtagaacgcatcatccagagactgcagaggacctcagccaagatgaagcgccgcagcagttaacctatgaccgtgcagagggagcccggagtccgagtcaagcattgtgaattattacctaacctggggaaccgaggaccagaaggaaggaccaggcttccagctcctctgcaccagacctgaccagccaggacagggcctggggtgtgtgtgagtgtgagtgtgagcgagagggtgagtgtggtcagagtaaagctgctccacccccagattgcaatgctaccaataaagccgcctggtgtttacaact

SEQ ID NO: 139 - DNA, 1890 bp; single-stranded, linear
  immediate source library: THP1NOB01
  immediate source clone: 030041
cacgngagtttntacagaaaaaataaaatngatgcccntgttttattgctattactaaatgtcaagattgtatgctattatgtcttgtaaaantcttttgttggtgtaaanatnggaatnccacaatggttaanncccntcaaattgtaatgcaaantggcactttcaagaggttttnnggaactnacaacttcaaaaacaaatgaggngcccaagggactttntgnaaaattnancaaancccggcanccntttctggaagtttgcagcatatatccgggcggccgtccgaaaagaaaaggggctccccatccttgtggagcttctgagaatggataacgatagagttgtttcttccgtggcaacagccttgaggaatatggcactagatgttcgcaacaaggagctcataggcaaatacgccatgcgagacctggtcaaccggctccccggcggcaatggccccagtgtcttgtctgatgagaccatggcagccatctgctgtgctctgcacgaggtcaccagcaaaaacatggagaacgcaaaagccctggccgactcaggaggcatagagaagctggtgaacataaccaaaggcaggggcgacagatcatctntgaaagtggtgaaggcagcagcccaggtcttgaatacattatggcaatatcgggacctccggagcatttataaaaaggatgggtggaatcagaaccattttattacacctgtgtcgacattggagcgagaccgattcaaatcacatccttccttgtctaccaccaaccaacagatgtcacccatcattcagtcaggctccagcaaaccttcaccaatttacatcagttcctattcctcaccagcaagagaacaaaatagacggctacagcatcaacagctgtattatagtcaagatgactccaacagaaagaactttgatgcatacagattgtatttgcagtctcctcatagctatgaagatccttattttgatgaccgagttcactttccagcttctactgattactcaacacagtatggactgaaatcgaccacaaattatgtagacttttattccactaaacgaccttcttatagagcaggaccagtacccaggggtccccagacttcatgggtgtagcatcaagatgcccaacagaggaactctttctttctaaccttgttcagattgaggtgaaaagtccatcttgctgatttgatgattgaaatgtgaaagtgaagtggaaggaatgaatgaagtgtgttttttttttcttttttgaggaattatcagggaagtgaggaaatgtttgggagaggactttctaagctctatttaggtgttagatctaattacttatagattctgtagtctggtgaaggtgtgggtgacgtgatgagaggtttgagaaatgggtgaaatgaaatgggggatatgtaggtcaaatcaaattaaagatgatttttttaatgtgaataaagttatgttctgatagtttgtacagcaaaaaataaaatggcatgcccatgttttattgcctattactaaatgtcaagattgtatgctattatgtcttgtaaatttcttttgttggtgtaaatatggaaatgccacattggttaagtgccatcatttgtaatgcaatgtgtcacttgaaaagagatttgaagaaactgacaacttcaaaaacaaatgagaagcccaaggaactgtgagcaattaaaagcaaaccgcgacaccctttgtctccaccacacatagtgtactttggaagcacaacgtccaggctggtaccgcagcgccatgcccattcctcgcctcgttcataggacacttcactgccattttctattcacataaaagaaaaataaatgtggaaatttcatccttgg

SEQ ID NO: 140 - DNA, 1201 bp; single-stranded, linear
  immediate source library: THP1NOB01
  immediate source clone: 030137
gctgaagtcagcctttgaggaaaccggcaagaccaaggaggtgattggcacgggctatggcatcctggaccagaaggcctctggagtcaaatacaacaagtccatttcagatcccccagaccagatgacctatcttccttccagctctgagtcacttcccattgggacttgcggttaatcgaagtcactgagaccatttgcaagaggctcctggattatagcctgcacaaggagaggaccggcagcaatcgatttgccaagggcatgtcagagacctttgagacattacacaacctggtacacaaaggggtcaaggtggtgatggacatcccctatgagctgtggaacgagacttctgcagaggtggctgacctcaagaagcagtgtgatgtgctggtggaagagtttgaggaggtgatcgaggactggtacaggaaccaccaggaggaagacctgactgaattcctctgcgccaaccacgtgctgaagggaaaagacaccagttgcctggcagagcagtggtccggcaagaagggagacacagctgccctgggagggaagaagtccaagaagaagagcagcagggccaaggcagcaggcggcaggagtagcagcagcaaacaaaggaaggagctgggtggccttgagggagaccccagccccgaggaggatgagggcatccagaaggcatcccctctcacacacagcccccctgatgagctctgagcccacccagcatcctctgtcctgagacccctgattttgaagctgaggagtcaggggcatggctctggcaggccggggatggccccgcagccttcagcccctccttgccttggctgtgccctcttctgccaaggaaagacacaagccccagggaagaactcagagccgtcatgggtagcccacggcgtcctttcccctccccaagtgtttctctcctgacccagggttcaggcaggccttgtggtttcaggactgcaaggactccagtgtgaactcaggaggggcaggtgtcagaactgggcaccaggactggagccccctccggaggaccaaactcaccatccctcagtcctccccaacagggtactaggactgcagccccctgtagctcctctctgcttacccctcctgtggacaccttgcactctgcctggcccttcccagagcccaaagagtaaaaatgttctggttctga

SEQ ID NO: 141 - DNA, 2959 bp; single-stranded, linear
  immediate source library: THP1NOB01
  immediate source clone: 030424
ggtgccgtcacgggacagagcagtcggtgacaggacagagcagtcggtgacgggacacagtggttggtgacgggacagagcggtcggtgacagcctcaagggcttcagcaccgcgcccatggcagagccagacccctctcaccctctggagacccaggcagggaaggtgcaggaggctcaggactcagattcagactctgagggaggagccgctggtggagaagcagacatggacttcctgcggaacttattctcccagacgctcagcctgggcagccagaaggagcgtctgctggacgagctgaccttggaaggggtggcccggtacatgcagagcgaacgctgtcgcagagtcatctgtttggtgggagctggaatctccacatccgcaggcatccccgactttcgctctccatccaccggcctctatgacaacctagagaagtaccatcttccctacccagaggccatctttgagatcagctatttcaagaaacatccggaacccttcttcgccctcgccaaggaactctatcctgggcagttcaagccaaccatctgtcactacttcatgcgcctgctgaaggacaaggggctactcctgcgctgctacacgcagaacatagataccctggagcgaatagccgggctggaacaggaggacttggtggaggcgcacggcaccttctacacatcacactgcgtcaggccaactgccggcacgaatacccgctaagctggatgaaagagaagatcttctctgaggtgacgcccaagtgtgaagactgtcagagcctggtgaagcctgatatcgtcttttttggtgagagcctcccagcgcgtttcttctcctgtatgcagtcagacttcctgaaggtggacctcctcctggtcatgggtacctccttgcaggtgcagccctttgcctccctcatcagcaaggcacccctctccacccctcgcctgctcatcaacaaggagaaagctggccagtcggaccctttcctggggatgattatgggcctcggaggaggcatgggactttgactccaagaaggcctacagggacgtggcctggctgggtgaatgcgaccagggctgcctggcccttgctgagctccttggatggaagaaggagctggaggaccttgtccggagggagcacgccagcatagatgcccagtcgggggcgggggtccccaaccccagcacttcagcttcccccaagaagtccccgccacctgccaaggacgaggccaggacaacagagagggagaaaccccagtgacagctgcatctcccaggcgggatgccgagctcctcagggacagctgagccccaaccgggcctggccccctcttaaccagcagttcttgtctggggagctcagaacatcccccaatctcttacagctccctccccaaaactggggtcccagcaaccctggcccccaaccccagcaaatctctaaacacctcctagaggccaaggcttaaacaggcatctctaccagccccactgtctctaaccactcctgggctaaggagtaacctccctcatctctaactgcccccaacggggccagggctaccccagaacttttaactcttccaggacagggagcttcgggcccccactctgtctcctgcccccgggggcctgtggctaagtaaaccatacctaacctaccccagtgtgggtgtgggcctctgaatctaacccacacccagcgtagggggagtctgagccgggagggctcccgagtctctgccttcagctcccaaagtgggtggtgggcccccttcacgtgggacccacttcccatgctggatgggcagaagacattgcttattggagacaaattaaaaacaaaaacaactaacgcctcggtactgacctctgcagagccgggtggagcccattgacgtccagcgaacacgtgagcagcgatggacggtcgggtgcagctgataaaggccctcctgggccttgccgatccggcctgcgacgcgtcgctggagggaacccgattccctttcccgagacgtttgacggcgataccgaccgactcccggagttcatcgtgcagacgggctcctacatgttcgtggacgagaacacgttctccagcggacgccctgaaggtgacgttcctcatcaacccgcctcacaggggcccggccctgcagtgggtgatcccctacatcaagaaggagagccccctcctcaatgattaccggggctttctggccgagatgaagcgagtctttggatgggaggaggacgaggacttctaggccgggagaccctcgggcctgggggcgggtgctctggggagggtccgctgtgttactggccgccgccagggtcgccaccggcgccctccctccnanacttcctccccctcgagccgccgcgatgtcccctgcgctcctgtcccctcccgcgtagtgcttgcctttgttccaggaatagcgctccaggctcctgctgcagctcctgggccgcactctagagcgcgctgcctccgccctcttttgccagcccagcccctccatgcacatttggacgctgtcctgcacttcaggtgcaagctgggctcctgttacatactggacagaccacccacagcngctgctgcnaacccacctccactcctccagactgccagccaactacatcattctgcccacagacctacgctaccactgccatcgccatccaccgcatctcaccaacagactgtggctcctagtgatgtggactcacctcggaggtatccgagctggacacagcccctggacagtgatccagacagctggccgtcccccaaggagcctgtcaccttcagcgagacccatttcctccccatccccagagacctcttgtgttcctgccacatagctgccagggcttaagtgtgcctggcaaccaaatcgaatctctcatttnctcctgt

SEQ ID NO: 142 - DNA, 2196 bp; single-stranded, linear
  immediate source library: THP1NOB01
  immediate source clone: 030659
gcagccagctggtggctgtgcagggactgagcggggcaggggcagccacgacctgcacctggggggctgccaagggatctgagagcggcttccacagcactccagggttgggctggttgagcggtggagatgacgtttcctgaggtagggaggacaggggagtctcagtttggtcctgggcccgggggactcagcgggctgggagccgggaggccgtggtgggagaagccagagctgggggtcccctcgcttccccgcagaccaccctagtgccgctgttccggaactcgcgcctggtccagttccacttcaccaaggacctggagacactgaagagcctgtgccggatcatggacaatggcttctttctccatctgtgaggtggagaaggttggactttggtgtttctgagccctccccccgatgtccaccttccagctgggccatacttgggccggctgcgtgcacttttcctacaaagcatcgtgtgagatccgcgtgcttatgctcctgtactcttcagagaagaaaatcttcattggcctcatcccccatgaccagggcaactttgtcaacggcatccggcgtgtcattgccaaccagcagcaggtcctgcagcggaacctggagcaggagcaacagcaacgagggatgggggggtagtggttaccccgggctgggcccctccaggagtcacagatgaggcccccgcagagactggtgacacgcttctgagcaggggcccctggggacttcaactgcccagcaacatggaggatggtgtcctgaggcctccaaggacggtccccacccctctacgtttccccaataaagccttttaaaaacctgaaaaaaagcgaccccactccggcggcgcgtcccccgagcttggaaggtgctcgggtcttcggggcactgggtcccatcggtccctcctcacctgggctcaccctcgggggtctggccgtgagcgagcaccggctcagcaacaagctgctggcttggagcggcgtcctcgagtggcaggagaagcgcagaccctactctgactccactgcaaagctgaagcggaccctgccctgccaagcctacgtgaaccaaggcgagaacctggagaccgaccagtggccgcagaagctgatcatgcagctgatccctcagcagctgctgacccaccctgggccccctgttccggaactcccagttggcacagttccacttcaccaacagagactgcgactcgctcaaggggctctgccgacatcatggggcaacggcttcgcgggctgcatgctgttcccccacatgtccccctgtgaggtgcgcgtgctcatgctcctgtactcgtccaagaagaagatcttcatgggcctcatcccctacgaccagagcggcttcgtcagtgccatccggcaggtcatcaccacccgcaagcaggcagtgggacctggtggtgtcaactcaggcccagtccagatcgtcaacaacaagtttctggcatggagtggtgtcatggagtggcaggagcccaggcctgagcccaacagtcggtccaagaggtggctgccatcccacgtctacgtgaaaccagggggagatcctgaggaccgagcagtggccaaggaagctgtacatgcagctcatcccgcagcagctgctgaccaccctagtgccgctgttccggaactcgcgcctggtccagttccacttcaccaaggacctggagacactgaagagcctgtgccggatcatggacaatggcttcgccggctgcgtgcacttttcctacaaagcatcgtgtgagatccgcgtgcttatgctcctgtactcttcagagaagaaaatcttcattggcctcatcccccatgaccagggcaactttgtcaacggcatccggcgtgtcattgccaaccagcagcaggtcctgcagcggaacctggagcaggagcaacagcaacgagggatgggggggtagtggttaccccgggctgggcccctccaggagtcacagatgaggcccccgcagagactgtgcttgggagcctgtggccagcagcccccactgcaaccctgcccccaggtgacaaggtttgagcaggggcccctggggacttaacttaccagcaacatggaggatggtgttctgaggcttcaaggaggttcccacccctttacgttttcccaataaaggctttt

SEQ ID NO: 143 - DNA, 2137 bp; single-stranded, linear
  immediate source library: THP1NOB01
  immediate source clone: 030772
gcttaaccaaagaaattgatctttttcaagcccgaggaccacattttaaccccagcgctattcataacttttatgacaatattggatttgtaggtcctgtgccaccaaaacccaaagatcaaaggtccatcatcaaaacaccaaagactcaagacacagaagatgatgagggagctcagtggaattgtaccgcctgtacttttttgaaccatccagccttaattcgctgtgaacagtgtgagatgccaaggcatttctgagccaaatggccctgtatcttctctaaaaccacatctaaagttcaagaaactagtctgtcatcgggaaaaagtttcactgctacataggattttgtcaaattgaaggtgtgacaagatggtgttctgctaatgttaaatgtcagcccacagagctaataatacctcagtataatgtcatgagcagttgaaattcatcacatgaaaagtaatctgctgaaagacttgggttgcccactgcctaactgtgtacagtgttaccagtgtcccattatggataattctcaatatgttaacacctaggtgttcccaatacctttttcccctcatgtcactactgaattttgacaggaggaaggaatagaatgatagcttgttttatttgtaaagctttcagtgaaacactacatacacgaagaaaaggaacaaggtttaactatttaagaaccatttgctgccgcatagtgccattggatagggaagaacttcagaaatctgtggtactcttggccttgtctttgtcttccctgaacgtgtctccactctgtgaagccagcatctaggggctaaagatgcaaaggaaagcagcatgcattgtctgtacaaatgtgcagcgaaataccccaaagcttttcctactttacaagtctctcgagtctgctttaagtgatttcttttcttcttgattattttcttatattctatatgtatagggtaatagccttttgttaactaattttcttttttcctttagtaattaagcacgatcatgtccctttttaggccttacctgagaggaacaatgccttaaaataaaaaagcattaatgagatgaaagtatgcacagaataactttcctctacttattctgtactttgccctcatgagttccaatgttgtgtgaagacaggcagatgctgcacagtgaattgcagatgatattacagaagtgatgtctgtaggtcacattaaatactgacttgagcagtgggtgacacaacacagtgtttgtcttccacagggaagcttaaaacaaaagatatttttaacccactgacagaacaacaaggttaagcttcatctgcttggtgtcccacagaacttgcacaagcagttgttattgggaaagtacagtctcaaaaccagcaacagcagcagtacctacagccctttttttggagagaagtttaaatgctttactgttggggcagtccatttctaatcctgacttggatgacagtatcatgtgtatttataaaacaaggctagccatatttaggacaactgaagaaaagctggaaaaaaaaacaagcaaacttgaacactgaagcaacctcaagcatctctttattttgatgatatatttttgtaaggaaaatattcagatgatcaggaatgtatataactgaaatcaagaaaaagaacagtatgcatttaaaaagacagaattatgaaattatatgagtgcttagaatggggctaagggaagtgctgaaatagagcaaaggatggaagataatatagactaccacccactgtaaatgtttgcaagtggctgtgttttaaatgggattattacagttgatctctatgaatgtcagagccctaactttcaggctttgcattttgtatatgggaagaaatatgacaatcctaggtaattaaaccatagacccaaagcccttacgtttgatgcaatttatttttaaaataggccttgtttttcagcttcatctgcagttctatgtgaagattgataaatcagtttttacttgttttattaataaaacgtaatttggatatcttgagttgatggttttgtgatttagctgggtaaactatctttgtaacagataagttatttataaaaattaaaaaac

SEQ ID NO: 144 - DNA, 2027 bp; single-stranded, linear
  immediate source library: THP1NOB01
  immediate source clone: 030796
caggagtcgacgtgtgcagaagtccttatagtccagggcctgtttccctgtagcagctccttattgctggagaaggagaaaagtgcccaagatcctttcaggatatttggttttttgggcgcgacacaaatcgaggattaatttattcaaaaaggaaataaaaaatactcaatatgcaaaagtcttgtgaagaaaatgagggaaaaccacagaacatgccaaaggccgaggaagatcgccctttggaggatgtaccacaggaggcagaaggaaatcctcaaccttccgaagaaggcgtaagccaggaagcagaaggaaaccccagaggagggccgaatcagcctggccagggatttaaagaggacacacccgttaggcatttggaccctgaagaaatgataagaggagtagatgagcttgaaaggcttagggaagagataagaagagtaagaaacaagtttgtgatgatgcattggaagcaaagacattcacgcagccgtccttatcctgtgtgctttaggccttgaattcatttttgcctaatattaaaatctggccccagctttctttctgttagcattttctgatgtatctttgacctccattttacttttaatcatctgatgaaattttgttttaggtaatttccttggtaccagcatctcattggattttggattttgacccattttcccaggtctatttttcaattggaaactttcacacatttgcatgggaatatgttcattccatgttgtaaagtaaaacataacaggttatggcaaagcagcatatttaatatcagctcacatatgtaggataaaattccaaactttgtgtgtgtgcgtgtgtgtatacatacatccattataaacatatatcacaaacttaaccaagcttatttctgtgtggtgtgaaattttatttgttttcttctttttgttctttttgcttatatgtactttttaatgaacacgtgtctcacacacaaaaagaattaaggattttttttacaagtaagagtcaaataatttgcaaccagcttatgagggcaatgggggcacctaaactcttgatgaaagaactttaaaaagaaatgtaaacctcaaattacctctggatctcttagccagaggaataaactggcaattattacagataaaaaaaaanganaaanaaanaaaaaaaaanagagatngaaanagagagaannaaagagggtgtgngtggannnaggnggangggnaangggnggggtggtttatgagccaccgtgctcagccgcaaaattctttatgaattttacacttggcaaatgttaatgacggaagccatagtctgctcctaatacatgtccaaagcattgactgttgtgtcattagctgcctggttacattagctccctggcttcttgtttagaccactgctaatcccttaaaaacaagaggtctggcactagtagcacaacctaaggtggcattacagatctttgaggcgagccacagccaacttttcctgccaagtcagcttagtttagacttcagtgaatcaggctattgctatcctaactgtatgtctctatagagtgtatttaagccacacatctgcccttggttgactttctgactcattgcttgcttgcttgtttccttgctttgggaaaactattgaaggttgctaaaaaataccactgcaaagtggatgggaaaagggtggagaacaggggagtagccaggctggatggctcaaatataaatgaatgaggaattctttatgaagtatcagtcagattttatgattaagtgatgtaatataggaattatgtaaaagggaagaatgtctgatactgatctattagagaggtactttagaggcttcttgattggcataaagttcctaaggttatagattttccccccttttggctgtatagcaaagtgttttaatccacggttgtgccttattgttccattaaaattgtatcttcgatccatcaataaatacttgtggttgaaacaaaananaaa

SEQ ID NO: 145 - DNA, 272 bp; single-stranded, linear
  immediate source library: THP1NOB01
  immediate source clone: 030880
tattgttgagactgcttttatgtgacctgtagtctcccacagaacctaaagtaataagctggcttttctgtgatagccacgtttgcgtatttctttccctatttcccttgcctgctaatgttgaacagcatgaacttgctttctgatgctgttttagactgtccctgttgtatctcaataatatctttgttttccttcagcctttattactataattgtncatnctacatgaaagctaggaaactgaaattagaagngcacttatcnnctat

SEQ ID NO: 146 - DNA, 1364 bp; single-stranded, linear
  immediate source library: THP1NOB01
  immediate source clone: 030897
cagaccacagcacagatggggcagccacaggnccccatgggatcttaccagaggnattactgaagctaaatctttcaactctccccagtcccctcatcccctgggcttcttccacttacttgttctaaatagagctgtttggaggatgttctctgcgctcccaggccggcatcgagtgtcatcaatttctaccacctgctctctcttctgcccaagtctgtgttgcttattccttacaaagtttatactgcatttggggctgtatctttttttgttttttgttttgtagaaaataaatatctccgggggcagtacaggtgtctgggcttgtatttgatggggtttctccggtccctgtttctactggatttggagccaggcccagctagccaagtttggaatggcatttgtcatgtcagtagccaccacctttgttcattgtgaacctaccaaggctttccagcttcatacacattgaccagagctcaagctcctgcctgcaactcctgcctagagttgaagaaaagcaaactagccttggcaggcacagtgtcatcataccctcaccccatatgtttggggtctgcttgaggattcataaatcagccactctggattgttgaggaatggccatggcagccacagaaaaaagaatttttctctctgaggccaaggttgttttttgtttttttctcttttcttttttgttttcatttcattggaagatctccaatggactgaacagctccagtcagcagcagtttaccacaaactgtgaatctgggccccaccactcttccctgttaaccagttctgtcagcatccccctctccagcagcacttccatgaagttgggtctgagactctggccgtgaacacccgttttcttcagtgatttgttttgggcttttggctcaaaaccccaggctcttgtttttgtctagactcttattctgtttcctgagcagcaggaggtagggaccactttgatgtcagacttctggtagctggacatgttctcgagatgggtggctgttcgcgacttttgtaccagagtgaaattgttagaaggagggtttctggctgtggttctaaatggagccccaggaagctgccctctccccagggtttgtgctcagtagagccctgtggatcacagtcttgaggtcctctagcaggggtgagggagagcagcgacttcagctgagtccctgccagtggttaagcaaacaatggtttcaaaattcaaggtccccaaatggcagcattttatgttctgacctgtttgtgttatatagtggttttttttttcctctttggnactnttgtgttgttaataaaatgaaatgattactttttaatta

SEQ ID NO: 147 - DNA, 1298 bp; single-stranded, linear
  immediate source library: THP1NOB01
  immediate source clone: 031122
ctgaccctctgacctccttcctgggcctgcggctggaggagaagatcacagagccattcttggtggtgagcctagactctgagcctgggatgtgctttgagatccctccccggtggctggacctgactgttgtgaaggccaaggggcagccagacttgccagaggggtctctccccatagccacagtggaggagctgacagacaccttctattatcgtcttcggaagttaccagcctgtgagatccaagcccccccacccaggccccctaaaaatcagggcctcagcaagcagaggagacacagcagtgagggaggcgtcaagtcttctcaagtcttaggattgcagcaacacgctcggctgcccaaacccaaggcgaagaccttgccagagttcatcaaggatggctccagtacgtacagcaagattcctgcccacaggaagggccacaggcccgcttaagccccaaaggcaggatctannnnnnnnnnnnnnnnnnnnnnnagaaatacttgagcaatttcagaaaaccatctaagtgctggaggaaccacgcttcctaactgctgcttctcagggaatccgacaccagccaaccattttaagcctctaaaagacctcgggcaagtctcacagaaactgagctgcagacggggagtagctttgtggaaactgatttgatggacactgcaccagcttccttcaggttctagattcttgctacttagggcgggctggtttggacctaacatctcgcacgtgactccctcagcctcagagccttgggatgcagagcagctggcagggttcctctcaatcctgcaaccccagctgtcccaccggtggatgcagaggggaatccgaggccatcaaccttggtgacagcagcgcagtgccaatgctgatcacactgcatgggagattttgttaacgtctgccacccccactctcacccccaagctctaagcccccgggaggcctggactgtcttcctcatctctgtagcaccaagcctgatagatctgtatatggtaaacaggggtttaaccacatgtggttaacatgggattaatgtgggaacttggcttcaagaacacaaccttaggaccttgggccccaaaagctggtggtgaaatgaggaggagccaatttaagaagacccttatggagacctgcaggctgccagaaactggtaggtttcatcaggtggttaaagtcgtcaaagttgtaagtgactaaccaagattatttcattttaaaaccacagaataaaaatgacacctgagcttctctatgaaa

SEQ ID NO: 148 - DNA, 2033 bp; single-stranded, linear
  immediate source library: THP1NOB01
  immediate source clone: 031139
gcgtcctagttccagtacagcgtggagggtttaggcagcgtgttctgattctttgcgggacggcgagcgcatttgtgctttgcccgccgcggcctaggaggccttttgaggccgcgtagtcggtgtttttgaactgactctacagcttctggcaggccgtgcggcgccctgacccggcctcaccatgttggtgctgtttgaaacgtctgtgggttacgccatctttaaggttctaaatgagaagaaacttcaagaggttgatagtttatggaaagaatttgaaactccagagaaagcaaacaaaatagtaaagctaaaacattttgagaaatttcaggatacagcagaagcattagcagcattcacagctctgatggagggcaaaatcaataagcagctgaaaaaagttctgaagaaaatagtaaaagaagcccatgaaccgctggcagtagctgatgctaaactaggaggggtcataaaggaaaagctgaatctcagttgtatccatagtcctgttgttaatgaacttatgagaggaattcgttcacaaatggatggattaatccctggggtagaaccacgtgaaatggcagctatgtgtcttggattggctcacagcctgtctcgatatagattgaagtttagcgctgataaagtagacacaatgattgttcaggcaatttccttgttagatgacttngataaagaactaaacaacctacattatgcgatgtagagaatggtatggctggcatttccctgaattaggaaaaattatttcagataatttaacatactgcaagtgtttacagaaagttggcgataggaagaactatgcctctgccaagctttctgagttgctgccagaagaagttgaagcagaagtgaaagcagctgcagagatatcaatgggaacagaggtttcagaagaagatatttgcaatattctgcatctttgcacccaggtgattgaaatctctgaatatcgaacccagctctatgaatatctacaaaatcgaatgatggccattgcacccaatgttacagtcatggttggggaattagttggagcacggcttattgctcatgcaggttctcttttaaatttggccaagcatgcagcttctaccgttcagattcttggagctgaaaaggcacttttcagagccctcaaatctagacgggatacccctaagtatggtctcatttatcatgcttcactcgtgggccagacaagtcccaaacacaaaggaaagatttctcgaatgctggcagccaaaaccgttttggctatccgttatgatgcttttggtgaggaattcaagttctgcaatgggagttgagaacagagccaaattagaggccaggttgagaactttggaagacagagggataagaaaaataagtggaacaggaaaagcattagcaaaaacagaaaaatatgaacacaaaagtgaagtgaagacttacgatccttctggtgactccacacttccaacctgttctaaaaaacgcaaaatagaacaggtagataaagaggatgaaattactgaaaagaaagccaaaaaagccaagattaaagttaaagttgaagaagaggaagaagaaaaagtggcagaagaagangaaacatctgtgaagangaagaagaaaagggntaaaaagaaacacattaaggaagaaccactttctgaggaagaaccatgtaccagcacagcaattgctagtccagagaaaaagaagaaaaagaaaaaaaagagagagaacgaggattaacagaaaggaattacgattatatcacccgggacacacatcatgcttaagattcaactgggagcataccagggatgctctctaacgtaatcaagggaaggttcagttaagacaaagtgatttatcatcttattaacttcaaaccttatttgtcttggacatccaacttctggttnaaccctttatggttcaatcnatnttncttttaggaggttctttttggattattaccaaaattaaanaaattttttccttnntgg

SEQ ID NO: 149 - DNA, 529 bp; single-stranded, linear
  immediate source library: THP1NOB01
  immediate source clone: 031413
attaaaatgttagatatttttcactggagctaagacttaaaattagggcattttgaaaggtgtatttgtttctgtttcttgtttgatatattttggttatctactcttttaaaaaactaaacgtataaaaggtatcttcaaattactgagtgtttcatccatcccagtaggtgaagtattctccagtgannnnnnnnnnnnnnnnnnnnnnnnnntaaatagcttgagcggtgtagcttganatgttttcagggaaagactatttgaatcanaaggnatagctttgatttctttttttatgtctcaaatatagaattatttgggggtggtcactcagatggaagaatattggcaattgtgttgaacattttaccttatatagttttgagaatttttgccaaaaactgatttcttagaaatatcctcccccagctgtgctttgngatttttnggtttttttgnntttaagacggagctttnctcctttcgcccagggntngnangtccaagtngcattnatccccgggtc

SEQ ID NO: 150 - DNA, 215 bp; single-stranded, linear
  immediate source library: THP1NOB01
  immediate source clone: 031416
gccctgcccagngtgcagacaaccaattcaaatgattgtgctaacttattttagctagctgacctgcccataaaantagaattctatatttctaactatatataactccccagattaggttttatttttnatctgcatacactaaaacgagaaaagtgtctcagtccatgtaaaatttgtngtacaatttatctcctttggagtaagaatatttg

SEQ ID NO: 151 - DNA, 1578 bp; single-stranded, linear
  immediate source library: THP1NOB01
  immediate source clone: 031470
agaaaagttaagcatgttgcctggatttgaaccatgtttctgtgacttcacagctatcttcttttctgctatttctcactgcctaggatctaaagatttttttttagacccctctaatcttttttaatttatctaaatgtcagttttccctttcctttcacaggtgacaaaaggtgagacactcacctagaacagtgccgtgctgctgctgggaagttgctttacacaacacaggccacatgggaaaggacccagcagccttcagctccttcctttctccttaaagagcaacagggcttattcttgtttttcttttttcaaaagtgtggcctttggctctgccatctggggtgtgggtggtatgtgggaagaagttcagaggaaccgttggaaacgacgttaggcattttaccttttcagtaacattttatacatctacttgtcaatgtatttgagacattcacagccaaaagcctgggactctttgtgaaggtcctcctcacctctatctttctttntntctctctcaaactttccttaaagttctcattgcctttgcactgcttctgtgaacagtctttgtctcctccccacctttggtgggaagtgcgggggcagtcctggtcaagacactcatgccctggcaatgtggctgccagagaatgttgttgctaacccaccagtttcttgttgatttggagaggtcaaggccagggcccccnccttnnttttgggggccatttnganttttttntgggnaattgggnggnttgncctganatttccctaataaantcctaactttgtcggggcgcctgcgcagtcgcttttcctcaggcggcggccatggcgggacaggaggatccggtgcagcgggagattcaccaggactgggctaaccgggaagtacattgaggataatcaccagcagcatcaagaaaatcgcagactttctcaactcgttcgatatgtcttgtcgttcaagacttgcaacactaaacgagaaattgacagcccttgaacggaggaatagagtacattgaagctcggagtgacaaaaggtgagacactcacctaggaacagtgccgtgctgctgctgggaagttgctttacacaacacaggccacatgggaaaggccccagcagccttcagctccttcctttctccttaaagagcaacagggcttattcttgtttttcttttttcaaaagtgtggcctttgggctctgccatctggggtgtggtgtggtatgtgggaagaagttcagaggaaccgttggaaacgacgttaggcattttaccttttcagtaacattttatacatctacttgtcaatgtatttgagacattcacagccaaaagcctgggactctttgtgaaggtactcctcacctctatcttnctttctctctctctcaaactttccttaaagttctcattgcctttgcactgctttctgtggaacaagtctttgtctccttcccacctttggtggggaagtgcggggcagtcctggtcaagacacttcatgccctgggcaatgtggctgccagaggaatgttgttgcttaacccac

SEQ ID NO: 152 - DNA, 980 bp; single-stranded, linear
  immediate source library: THP1NOB01
  immediate source clone: 031859
gccagcgcgggtcttgtccatagtgttgataagctgtacatgtttgtatattgttcaaaacttaacttattctgatttttagttatagctctttaattctttttccccggngaggggggaggttttatttccaagttttctaggaacccatctccgtctgggcgctgtgagtggggtgggcacgtccgggcagcccagtgcgtctgtcgcacgtccccaggccgtgctgctggcgtcactttctttgatatgtagctttttcttaaagacttttgaatgtttaataattttgtaaatcatgctctttacacagagtaccacttatttaataagacgggatgtaaatttacaatgacaaatgtgtattttaagaaagaaaatgacattattttgaatggtactttgtggaaagaggggagaataaagttatgctgtgtacatcacttgcagatcaccaaaaacactccgctgcccgtgaccgccggtgggtgtgtccccgctcccgtcgtcccgcccacctcaaaccccgcaggtgtgcctcccagcggattatttattgtaggaaagtgtattcatttgctttataatgaaaaatacatttgcaaaggtatattgatatgcatttttatacaggcacataaaaattcaacttggcttgggagcagaatgcattgcattgtataaatgactctggcctgtgtgtactttgattttataacttgtaatcttttgtttacaatgaggggctttctgtaacttgttttaatttagaacactttggtagcaatagaaactttggatacatttttgtatggtacctgtgatgtatatagaattagtactttatttttatttttaagaggtaaagcattatgttggggaaagtagggtgggtttccaaatttgcattttttatattaaaaataaagtcaagatttggaaannnaannnaannananannnaanganaacaagnaggg

SEQ ID NO: 153 - DNA, 1617 bp; single-stranded, linear
  immediate source library: THP1NOB01
  immediate source clone: 031968
cagccatgtgctgctatttctagggcttctgggctttgtcccttactgagagattagggactccacagctgccttgaggtagggcctggctgagagacaagggtagcagcaggtggcaggctgttaaaagacaggctgcctgaggagcctggagcaggtggaaacaggtggaagaaaccggccacagccctgctttaccgggctcacctctagggcattccagcaagaggctgatgcaggagaatggccagcaccaaaggacatttaaaagagtttnnnnnnnnnnnnnnnnnnnnnnnnnnnnnnnnnnnnnnnnnnnnnnnnnnnnggcacacttgagctgactcagtgcaggtttaatatcctggtgacttgcagtcacattctaatgactttcaagggccagaatatggtgaaaatcacttaaaatatccgtcccttccatgccttagtttagcaggtaggctctatcttttgccatttctgtattttatgtgctgtgttcccgtttcactgggtatgaactgtgaaatggactgaatcctggccactttatgagtttgtttggttttataaggcatttcaatgtacattctataaatacaagcactccatttgcaaacagatcttaagctaatattttctttcccattcatcttgccctccccctcctcccgccagctttaaagttcagtggagaagccagatggcaattcagacaaaggtatactcttcctgcttcatgggtggtggcacgggaatagatagcccttagccctttccctcccagtcccagctgagccctcagaccacttgcttcccacataacaatgtcgcctccatttccgaggaacatccttgcgtagagaatgaaatatgctgcaatcatttctgcatccttactcctcacccccaaagaaaaaaaaaaaggcctagcagggaagcagcatgcaggcttcacagcttaatgccaaggacagcgagtgaggctgggagcttctcttgggcctgctgggtctgtcagctctcggaatagggacagtccttactggtgccccaaggtgggacttggagaatattttgcttggcatatgtttggtctgaatggtgtagttgctggttccctagagaggaaaaggtggcaggcccagctttgctggggaaatggctcttaatttccagttgaaaccctagtagaattgtgaatgaaaacctcaaggttgagcccctctgccaagcagcagagctagtagaaggggatgcaggggcaaagcactcagttgccaagcaaggaggagagatgtacgtgggctgtgtggcagtccccacaccctgccctggcttcttcaggttatcgcaccactatggaatcctttgcagaatggtactcatataatggtttaaaacaacacattcataattgactctgtgcaggatgtcactcaatcagtttgggtttgctttattttattttatatatatattttttggtatcctgtacattgcagtgggtgtgaagatagtattttaatatttgtacaaagtttaatttaattttaattgttctatgtatataactgcatttctaaataattaaaaaaaagttcttatgaaggc

SEQ ID NO: 154 - DNA, 1706 bp; single-stranded, linear
  immediate source library: THP1NOB01
  immediate source clone: 031982
aaaatcactttttgatacttctgttaaaatagataataaggaaccatatcttaaagtgtggaggatctggcttggcttctgtttttgatagctctatgaaagtgacagatttgcatcatgagacttagtggaatgaattgggaaattgaagggcagccccagtggctatggattctattttctatgggactgtctacgccaggctttattttctctttgctcagataacttctgactagagtcgacggtaggattataaatggtttaaaatacgtattctcaaacctcattttcagcatataaatttttaagaatcagtgtttaaaggtacgtgaaacccatttgctagatttttgtcctagttttttttttttaatttaaaaatcttaagttttttttagtaagcttaagatgtccagtagtttatttgcagacagcatttttaaaaagtgaataggatgtttaactgaagttaaatacaaatttatgtctgtgtaactcttggtaagatataacaaaacctagacatctaaattttttggaaatttttattttaaaagtttgttgggaggtaaaattgtgtgactttaccttctggttaatagttttatagttaagaagaaagtccagcgaagtttacttgatctcagttgcactccagaataggggatttagttccactttggttattttcacttctaccctaaattcatagtccctgatacttaagctttacccttgggnttaccagttttcattgcagcgagtaaatggggagtagcagagcctttgttaatgtaaattgacaaaaagtattgtccttttctagcaggagcagataaactgataatggtcttagaaatgtagaaaatgattttttgtagacaggatgatctgtctagattgtagcaaatgatggtacatattcacaacaaagttgtgccactacatttaataaacagccacaaacaacaaaaagggcaactggtccccgatataaatggactagctacctggacataatatccttgtgaggcatccttaaaggacaaattgcagctggtatttgggtgaatgttgttgctctgtgcctgttgaatgtccatgctacaagaagttatgagccttgttctaagtacagatgaaccttgtatttgtgtaatctcccaagggagagctatggtttacattcaattttttggtctttctgctatgaaacgtgtttattttgcctctgtcaatgtgtttgcaaccttaagtaaggaaagggaaaaaaaaaatagccctctggaactctgatcttttgccgcttctgtaggattttgattgtgaagttggggagtgaggacattcaaaagcccatggtgaatgcatatgcctttagaatattgtgcctgttttaaaatgtttgagcttttaaaatacgttgttaaaacatgaatccatttttgtaattgtataaatactcataactaattttgaatgctactgcnttgtgtaactgaatttttgtatccaaaaatacattcttgagtactacttttcctaccttgaaaatctatttcatttactaaatattgttttctttatgctaacttaactttaaaaggaatgttgccaagctgtctctcctcccccatcacaaggggagnnttnttttttttttttcttcaataaatgatagcattatggatctttaaaaaaaa

SEQ ID NO: 155 - DNA, 775 bp; single-stranded, linear
  immediate source library: THP1NOB01
  immediate source clone: 032302
agactgcgggcccgtagctgggctctgcgaggtgcaagaaagcctttgaggtgaaggtgtatgaaagtcatcataacagatgttttccaaaaacttgtagaaggttgtgaaaaaactactaggatcacgcggcatgtattgaggtgtggcatgcagcattttggaaggaaaattgaagacgtgttcaagaaaacatgaacagaagcaaatgatgaaaatgagcattttacttgatgttgataacatcacaataaattatggagaaaaatacatatttggctaacttttaattgctgaacaataaagtgttttcttttaaatccctatctttaacntcaagcccagtgctttgcagtcaggattctataatacaatgagaaaaacagaagtaataagacgtgaaaatcaacagcaaattataacatgttcataaacaaggtgcaagaaagcctttgaggtgaaggtgtatgaaagtcatcataacagatgtgttccaaaaacttgtagaaggttgtgaaaaaactactaggatcacgcggcatgtattgagcatataggttgctgtagatgaatgttcttnaggctgtcatgtttaaaaatacttctgcttcgttacctcaaagtgtggcatgcagcatttttggaaggaaaattgaagacgtgttcaagaaaacatgaacagaagcaaatgatgaaaatgagcattttacttgatgttgataacatcacaataaattatggagaaaaatacatatttggctaacttctcgagccg

SEQ ID NO: 156 - DNA, 2142 bp; single-stranded, linear
  immediate source library: THP1NOB01
  immediate source clone: 033600
ctttaatttttctgggaacacacctgccttttgtgtaatgcggggaagactaatgcatggtgacacctagttttcctcaacaggacacttgatcccaaaacccctttaagaccttaggtttcctcagcggaaaactgtactttaatcccaaaccccctttaagacatattggggctgagccactgtgcccagccaaaagagaaatttctacatgaacaaggcaatttcagtgtcttacagcggccaaaccatgacgtgaagaatgagataggagacaggagatcaccataagcgtccctgatatagcagcacacattttcacgtttccacttaaatcgttttgcacaaagtcttgcttcgctcagatgagatgagatatgatttcctagagatgtaaaaataagaatgaatgtggcgcccccttcttccagatgtaatagaaagctctgccctatcacaaggggggtgttgaagcgccccttgtgttttaactgtatttaactgagcacaagatgcacaagctgtggtgggaaaccctcagtttacctttggagtcttccctgcagatcgcagacctgtttccagggtgatgtttctggtgtgtaattgcctagcgtttctgaagggttttcccaattgttttagccttgtgaagtattcttaattataacttgcctttcagcggatggtacatgacttgattcaacgtttggttctgaacttacacactgatgcgtttactcatctaacataatctgacagggcctcagcaagggagccatacatttttgtaacattttgatatgttttaatgcatctgacttagatcttactgaaataaagcacttttcaaaganaaannaaanaagaanaaaggagagccctctgcacccaaagaggactagagatgccgagcggccatgagagagagcggaaggagcagctgatgcccagagcggggccagagcggcgggtctatgttcacgtccccccagcagcaggcggaaccacccagccagggcactcagtgcattggactgtccacatgttcttgaggaaagccggtggaagattctggaatgccgtgcggatgaaacttcaagcacccgagtcagtcccagctcatcctccccagtttaccactttgttctaataggagatgggaacacgagaagtttgatggctttgccctgggctgggaatacctcacccacgcccagttccagaaaggcctccagctgagcagacggccccgatcccgccagaacggccttttgcttccagccaaagaacaccgccaacacgcgcacctccaacctgggacatcccacgctgggcctcgcacggaggaacctgcagaatttggattctgagggtagtcgggaggcctcggtagccaggcagaacaggatatctgccaaagggtgtctgatgtggggtggggctggcatcctcccaggaaggttctaggtgggaccccgtcttctgggggcgggggtgtcttttcatcttccctggtttcctagaactcacttcctttgaacggcgtgtgttggtcccatctctcagaccagctcactgaggcagaggagttgctcagaggctcacatgggcacccccattggttcgtgtgagcagctgcccagccccaggcctgccctcggcctggtccagcatgaaggcgtttccatctgcaaggatgcacggtaccctccccgagagcaggcctgtcccctacccaactgggaataaactggaagctgggtctctttgttgctatgtttttttgtttgaagttcccaggaatatttgaggggttccggtgatgtgtttagggatcttctctgtgggggaaaaggaagaggagggtcttgttctcccatctgtttattctttgggctctgggaacaggggactactttggggctttctccagacttttgtatgttgttattaaaagcgagctattgcatttcattctgnctcagtttnnccacctgtgaaatggggctgataccacctacctcactgaagtnccagggttcaagtgtgtggctgggtcagggcgtggtcacccgtcattctgcataggtcgggttggatgttagactcctgggatgccctacnnccccctcgnccttt

SEQ ID NO: 157 - DNA, 2152 bp; single-stranded, linear
  immediate source library: THP1NOB01
  immediate source clone: 034109
tgtgggagtngccttgacctgcagctccgccaccgcggacccgccttctgccctcagcagcagacgctctgtcccgcccgggncagctctgcgaggcagcggctgggagagggaaccatggggactgtggcacgcccggagtttggagccttctttccattcaaagtgggacctgaatttttgggagggattnagggagaaagaaagcctggaaatttgntnggaaagttgagagcccctgaaagcctnaaaacnaggaanaatttccttggaaaaaaccaaaagatngtgaattgttccaaaaatggttcnatttctcagatcagtcctacaccgacaccggcttcttagctgaatacctctcctacgactccagtgacccatgcccggggcagttcacgtgccgcacggggcggtgtatccggaaggagctgcgctgtgatggctgggccgactgcaccgaccacagcgatgagctcaactgcagttgcgacgccggccaccagttcacgtgcaagaacaagttctgcaagcccctcttctgggtctgcgacagtgtgaacgactgcggagacaacagcgacgagcaggggtgcagttgtccggcccagaccttcaggtgttccaatgggaagtgcctctcgaaaagccagcagtgcaatgggaaggacgactgtggggacgggtccgacgaggcctcctgccccaaggtgaacgtcgtcacttgtaccaaacacacctaccgctgcctcaatgggctctgcttgagcaagggcaaccctgagtgttacgggaaggaggactttagcgacggctcagatgagaaggactgcgactgtgggctgcggtcattcacgagacaggctcgtgttgttgggggcacggatgcggatgagggcgagtggccctggcaggtaagcctgcatgctctgggccagggccacatctgcggtgcttccctcatctctcccaactggctggtctctgccgcacactgctacatcgatgacagaggattcaggtactcagaccccacgcagtgaacggccttcctgggcttgcacgaccagagccagcgcaggcnccctggggtgcaggagcgcaggctcaagcgcatcatctcccaccccttcttcaatgacttcaccttcgactatgacatcgcgctgctggagctggagaaaccggcagagtacagctccatggtgcggcccatctgcctgccggacgcctcccatgtcttccctgccggcaaggccatctgggtcacgggctggggacacacccagtatggaggcactggcgcgctgatcctgcaaaagggtgagatccgcgtcatcaaccagaccacctgcgagaacctcctgccgcagcagatcacgccgcgcatgatgtgcgtgggcttcctcagcggcggcgtggactcctgccagggtgattccgggggacccctgtccagcgtggaggcggatgggcggatcttccaggccggtgtggtgagctggggagacggctgcgctcagaggaacaagccaggcgtgtacacaaggctccctctgtttcgggactggatcaaagagaacactggggtataggggccggggccacccaaatgtgtacacctgcggggccacccatcgtccaccccagtgtgcacgcctgcaggctggagactggaccgctgactgcaccagcgcccccagaacatacactgtgaactcaatctccagggctccaaatctgcctagaaaacctctcgcttcctcagcctccaaagtggagctgggaggtagaaggggaggacactggtggttctactgacccaactgggggcaaaggtttgaagacacagcctcccccgccagccccaagctgggccgaggcgcgtttgtgtatatctgcctcccctgtctgtaaggagcagcgggaacggagcttcggggcctcctcagtgaaggtggtggggctgccggatctgggctgtggggcccttgggccacgctcttgaggaagcccaggctcggaggaccctggaaaacagacgggtctgagactgaaattgttttaccanctcccagggtggacttcagtgtgtgtatttgtgtaaatgagtaaaacattttatttcttttnaanagaatngngtgaaaat

SEQ ID NO: 158 - DNA, 610 bp; single-stranded, linear
  immediate source library: THP1NOB01
  immediate source clone: 034755
ggggaccagaataaatcttagaccccacagtccttcccatttccagccctaatctacagacaggaatgcccttcaggtttcttccctcccccctcttgacctaccccagatatttgtgtggaagaggaggaatcaccatttacaaggtggacaaatgctaatatttttatctagaaagaagagtgagtgttaacttttatttttttccttctggggggtctgttgactcctttcttttgggtgctgcctataaatcttggaggaatcatttctcctcctcaaaaactgattcagaaactgacttggggaaggaatttaatactttgaagtcatgagatgcaccatcgaggctacccccaagaagaagcagaagagaagttggtaatgagaggggattagaggtcctcccttcagtagggctgtgaaaacctcatcactggaggtaaaagcacaagcaatgcctgtggacaagatgtcattcattcactcagcaaatgttcatggatcaccggctaccaaggtaccaggcaccatgctaggtattggggaagagagactgaagtcacaacccctgactgctcctcaaaagctaacggttgcacctccaagt

SEQ ID NO: 159 - DNA, 320 bp; single-stranded, linear
  immediate source library: THP1NOB01
  immediate source clone: 034925
ggtgtacagttctgagttttggcaaatgcagtcaagtcactaccaccaccacaattaacagctatatcaccctccagtaaattccctgtggtcagctccttccccaccttttaccgtggcaaccgtcaagctattctctgtccctataccaggtgtcatcaaatttttttctggaaaggcccatgcagtaaatagttcaagctttgtgggcttttatagtctctgttgctgctgctgaactcagctgttgtagcacgaaagcagccaggtaattactagatgaaggaatgcaggtggctgtgtttcaatagagctttatt

SEQ ID NO: 160 - DNA, 1269 bp; single-stranded, linear
  immediate source library: THP1NOB01
  immediate source clone: 034995
gaggggacggtgaacggcgtcaccctcaccagctctggaaaaagatccactggaaactaggccgggaagcagcagcccctccaagggccagggcacctgggagacgggaggattccagaacagcagcactgagctccnacccgcagagcctctggacggncttggcnacancnaaaatcatgggacaacacctctctccacggaaaggtcacagtggacagcccgggcagtaggatgcagccccagaggctggtggcagtttcctgtccattggtaggtgacggcccctggctcaggcagagggagatggttagactcttgcagggctaaaactctaatttggaattgaatattgtggatatcttagttaaaggccatgcttacagcttagaaatgaagccttaagctgcatcaagttacgaagtgattaatttccttctcagcaaacctccgggaggttccagaatgagttcttcctgacaggttgtcttcactgggagcgtggggcccccaggccccaccagcaccgtcctcccctaatgaggggccctgccgaggcatcagctgctctgctcagttagtttttattcccggggtaccaagcagctgcacagtcggtgcctgggaggcacgtagaggcccagagagtccctgggggttctgctctgaccgtgtgggtggtgatccttgtcaggatgtacagtccttgctcccaccccatccaggatggccgcctgtccctgactattgagtcctgttgttgtaagccaggcatggagggctcctgcccttctgctgagccacagcccattgcagcactgtgctggccagacttcagctgccttgggaactgaagccctgccactgttgctagtcaggggcttggttctcccacttacactgttgacatctattttctgaagtgtgtttaaattattcagtgctaatcattgttttttcctttgtaaatgttgattcagaaaaggaaagcacaggctaagcagttgaaggttccccaccattcagtgagagcagaacccccattccccagcctctgctggtagcatgtcgcagtttccatgtgtttcaggatcttcgggctgtcgttagacaggttaatgaagaacacttctcaacagtttcctttttgttttcctttataattcactaaaataaagcatctattagtgtctgatttaggaatgtaaaatgattctgtattaatgtaaataagattatctattgcaaaaagatatttcaaacctaaaa

SEQ ID NO: 161 - DNA, 285 bp; single-stranded, linear
  immediate source library: HUVENOB01
  immediate source clone: 035437
ccgaaagcggagagtgtatgacatcaccaatgtcttagatggaatcgacctcgttgaaaagaaatccaagaaccatattagatggataggatctgatcttagcaattttggngcagttccccaccaaaggaggttcnagnggnacnttnctncttattnncaaattggaggntcntttgntgngntaattaaggntttttncncagcanctgtttttagttnacanattntcacagngaacttttaaggcttgcatatnttggccnatnaaaggcattnatagga

SEQ ID NO: 162 - DNA, 930 bp; single-stranded, linear
  immediate source library: HUVENOB01
  immediate source clone: 036448
gacagaataaaaaatacacctaaanntnngcttaanatatgttaatattttatattctgtcataaatgtnatgacagaatataaaatattaacatattttaagccaagttttaggtgtattttttgaatcttggttataaacccaattttaaagggcgatgtatccagcgttgtgaaggcaacagagtgtacccatatttatatttttataaaatacctataagactgtgaatctcttgtgctaatggctgagttaattgaaggatcgttttgcccctttttagcctcccagagcttcgaggactcaattcgaacccgaaatcctgccgtgggggaggggttgcgtcgagacctgggcccggggaggttctcctgcgtcactttctgtcctgaaaggcgcccttcctggtttctgtggctccaattttctatgcagccccacaccccttgttgttttgatcctgagaaataaaagggaggctgaattattcaaatttaaatgaggtttccccttcatggaagtgctgctgacccttcgtgcagaaatggggagcacttgaggacacaggtgggtggaggccctttgtgcgtggctggtcgtattcgggcagccctccgtcggtttttataaaactttgtgtgagaagaatatattgataatgtcaggtgaaacaagcagacattgaaatggaggcacagattactccacaaggagttcttctgtatattttttctagatgcaaatacctttttaattatgttaattaatgttaagactttctaggcttatatcgaagctgtgtgtgggtcacggggtgatcactgctaactggataaagtttgtgcagcacattcctgagtgtacgatattgacctgtagcccagcgtgaaaaatttataaataaatttttcattgatctttttatatta

SEQ ID NO: 163 - DNA, 2769 bp; single-stranded, linear
  immediate source library: HUVENOB01
  immediate source clone: 037497
ggaccaaggacactgaccccaagctgtcctgcctagcgtccaggncttctaggagggtggggtctgcctgtcctggtgtggttggtttggccctgtttgctgtgactnnccnccncccttcccgaaccgagggacggntgcctttgtctntgcctnanatgccanctgncccgnccatggtncccatnagnaggatncagantttnanggagggnaaggccaggcagtncagaaccggattcctnaggaagggctgtaaggnattttttggggggnccctaataaccagtggagnttgntaacgctcccggaagtggagggtctacacgaagcgccgctgggtctgggtgcccggaggcagcagcgttcgcggagttcgcccgctggcccccgatcaccatgtcggctttcgacaccaaccccttcgcggacccagtggatgtaaaccccttccaggatccctctgtgacccagctgaccaacgccccgcagggcggcctggcggaattcaaccccttctcagagacaaatgcagcgacaacagttcctgtcacccaactccctgggtcctcacagccagcggttctccagccatcagtggaaccaacccagccgaccccccaggccgtggtgtctgcagcccaggcaggcctgctccggcagcaggaagaactggacaggaaagctgccgagctggaacgcaaggagcgggagctgcagaacactgtagccaacttgcatgtgagacagaacaactggccccctctgccctcgtggtgccctgtgaagccctgcttctatcaggatttctccacagagatccctgccgactaccagcggatatgcaagatgctctactatctgtggatgttgcattcagtgactctgtttctgaacctgcttgcctgcctggcctggttctcgggcaacagctccaagggagtggactttggcctctccatcctgtggtttctgatcttcactccctgtgccttcctttgttggtaccgacccatctataaggcctttaggtccgacaactctttcagcttctttgtgttcttctttgtatttttttgtcaaatagggatctacatcatccagttggttggcatccctggcctgggggacagcggttggattgcagccctgtctacactggataatcattccctggccatatcagtcatcatgatggtggtggctggcttcttcaccctctgtgccgtgctctcagtcttccctcctgcagcgggtgcactccctctaccgacggacaggggccagcttccagcaggcccaggaggagttttcccagggcatcttcagcagcagaaccttccacagagctgcttcatctgctgcccaaggagccttccaggggaattagtcctcctctcttctctccccctcagcctttctctcgcctgccttctgagctgcactttccgtgggtgccttatgtggtggtggttgtgcccagcacagacctggcagggttcttgccgtggctcttcctcctccctcagcgaccagctctccctggaacgggagggacagggaattttttccccctctatgtacaaaaaaaaacaaagctctctttccttctctggtgatggtttggtaggattcttttgtctctggaagcagtgggactgaagttctcttcgtcctgtgcacacacaggacacccccacacagttgggaatcacaggctgacctgggcccatcccagctggagctttctgccagggtcctgggccttgactcccccaccctgcaggcctggcctgaatctggcttcttagacacagcccagtccttcctgcctgggctgggaataagcctctcacaggttctggtggacagatctgttccccaggtcactccagtggtctccaggcttccagagaaggctggttgcctcaagctcttctctgcctcataaacggatccagagaaggctggtttgccttaagctcttgcctgcctcgtgttcctgagaaacggattaatagccctttatgcccctgcaccctcctgcaggggatggcactttgagccctctggagccctccccttgctgagccttactctcttcagactttctgaatgtacagtgccgttggttgggatttggggactggaagggaccaaggacactgaccccaagctgtcctgcctagcgtccagcgtcttctaggagggtggggtctgcctgtcctggtgtggttggtttggccctgattgctgtgactacccccccccctccccgaaccgagggacggctgcctttgtctctgcctcagatgccacctgccccgcccatgctccccatcagcagcatccaggactttcaggaagggcagggccagccagtccagaaccgcatccctcagcagggactgataagccatctctcggagggccccctaatacccagtggagtctggttcacaccctggggggtgtgtcactgtgatgggacacgtaggagtccacccttaaaaccagcaccctgtccctcgaggctgccgagtgggtgtgtggactggggtgccttcccacaaaactagcctccggctctgggcccgagacagccgcaggccccagccactgaatgatactggcagcggctggggttttatgaactcctttctggtattttttcccctctatgtacaaatgtatatgttacgtctcaatttttgtgcttaagtaaaaataaaaacattttcagacaaaaaaaagaaaaaaaannnaaaa

SEQ ID NO: 164 - DNA, 373 bp; single-stranded, linear
  immediate source library: TBLYNOT01
  immediate source clone: 040266
attaaagtcagcccagcaccaactccgacgccaagcgttacactggaaactactttttaaagcaacaaaagagtctaaaacaaaatacaacatttcttaaatacactgtttccagaaagagctattttaacagaagcaactcaaagatatcccttcgacagaagtggaagtgctgaaaaatgctcatctctcacacagacttttgatgggccaggagttctaaggtatcatgcctaccaccaagctgtaaaatgatcaccctgaccatnaaggtnaacctgtcccttttacaggtacatccggtggatccaaatttcaggcccttgtcttctnttagctgtacctcataatttgggttttngttacatccctg

SEQ ID NO: 165 - DNA, 900 bp; single-stranded, linear
  immediate source library: TBLYNOT01
  immediate source clone: 040330
cttatgaaaagttctccaaagaagagctgaaaaaggcccaggatgttttggtgcaggagatggaagtggttaaacaaggaatgagccatggagagctctcaagtgaagcttataaccaggtgtgggaagaatgctacagtcaagttttatatcttcctgggcagagccgctacacacgggccaatctggctagtaaaaaggacagaattgaatcacttgaaaagaggctcgagataaacagggggcanatgacgacagaagccaagagggctgcaaagatggaaaagaagatgaaaattttgcttgggggttaccagtctcgtgctatggggctcatgaaacagttgaatgacttatgggaccaaattgaacaggctcacttggagttacgcacttttgaagaactcaagaaacatgaagattctgctattccccggaggctagagtgtctaaaagaagacgttcagcgacaacaagaaagagaaaaggaacttcaacatagatatgctgatttgctgctggagaaagagactttaaagtcaaaattctgaagtacagtttatattctgtcacaggattaattaattgccggttttcatactctagaaggctgaaactgatgtttatcttcattgacaaatttacccaccatctgtggtttttcagttgtttattttaaatgatatagatcttacacattctgtgtataaagaccttaactccacaggacggacattttagagtttaaattattaaggctatcattcttttagtaatgtcatatttgcaaacttttttagttttggcctttaatttaaaaagcctaattttaaagtgctgcctgtgagtaactcttgaatanancaaanttctccaaacactcccancncaaaaaacctt

SEQ ID NO: 166 - DNA, 1069 bp; single-stranded, linear
  immediate source library: TBLYNOT01
  immediate source clone: 040395
aatcaaatgaaagagcattcctggggttttttgtttgtttgtgtatgcatgtgtaaactcatgagcaactgcatctgtagatctgtcattgttttatattgtgtaaattactttcattgtggctatttctcaagatgaaatttttattgttctaatggatttcatcagaaatgtgtataatggatctgctgacagtagtagtattttgttttaggatgttgtgacttagcaaaaataatacagatgtcttccccccttttgtagcttttgacaatttgaattagatttcaaataaaatctgaacagaaaactataatgttgtttttttgccccaccggtgatattaagtcccttaaagtcctactgagtttcacactactgttgtgcttcttatacctgatgcactttataagccccagtgttcaagtagcttaagttttatatttactaagatgactatccaaattaagggacctgagactcctatttggtggtttgctaaccatttgcttttgataagtttctcttgggtaatactaatacccagatatcaaagactaggtagatatggcatggcgttttgttagtggaatgcctggctaaaacatttttttcacagaagcaatatgatttccatacatccaacccatgttctgagcaactacttacttttagggggaaattaaatatcttttcatttcctcttctattatgaaagaagtttatttgtaaaacaaattttctaacaaggtttggccatagaattctcttgtatgattgttgaccttttataatcttctgtaggctatctttcaaacactggcatcagaatattttttataagtttgtgtttaaacagcttagttggtccccccccccactcccaagagacttgggtttagttatagctttaagtaaaatttaaaaataaaatgtttttcaggaaacttcgtatctaatggtttgtaaattcaaggtgcaaaaagttgatttaaaccatttgcagagttgaactctattatgaaaataaatttgctacggtatgaggaagaaataaaacttgtgtaat

SEQ ID NO: 167 - DNA, 1545 bp; single-stranded, linear
  immediate source library: TBLYNOT01
  immediate source clone: 040476
gggggagagtgtggaaataggtgcttcctttggctggcaaatgtctacatcttgaaacaaacagatgtacctaatgagcttctccattcactttgtaaaaataatttgtatgtgtaccatcttggtcctctcccctcccgttttgttaaaatatcaggatagcactcccaggccactttggtctcagtgtaagatccctattaactatctgaaaggaaaatagagccaagacctctggtctcaaatatataggaattgcctttctttagtcttcaggactattgtgtgaaaacaagtaggggtctaatctcctagaaggtaggggcttttatccttaaagagaatatgtccccagattattagcacttttagaggagaagccaaggtatgtagggtgtgtggctggcccatcagtggagcacgaagagagaatgggataccattgtgggaagagaagaaaagttcctcaggggcctcccactgctaaagttttttgtgagatgttgatctgtgcttcctggatttgacttttaaaggaattattctggcagcacatgtagtattcttggatgatcttgctgctcttatttctcctnnnnnnnnnnnnnnnnnnnnnnnnnnnnnnnnnngtttcatttgtaactccatctgcttaggagagtgggctctctataagggaacctgctgtaaacttcattgcagcaaggatgtagagagaaataggacttaattccactaggggctctcatctcacaccttaaggaggagatttctagaaaaactgggccagattttctttgttctccatcattttaatgtggcaggctgttcagttttcttactcttacctatgtgatatttcttcgtaacgtgtccaaaaagaaaaaagacccaatcagtgtctcttgactttgttctttgatccctcagtttcttcttgatttcagcatgtgtcgggttcctaattttgggtatgagttagcaaatttaaccattgtgtttgtgccctacccaggggactccccagtttctgacttgaagtagactgagaagaatccacgaggtgctatctggccagatttaagtagattctatttccttggttctccctctccctgaggacctcttattttattgtcccctcttctaggttaattctcctttgatttgactttgttgagaaggaggttggacagtagattagcaaagttccaagtgcaaaattacagtgtgttagagtgtggggggaaaattagtcttatttttccctacatgggatacaacactgtgaattcaatcttcaactgaaggccctgcagttctcctaaaacatagttgtttgtttttctttaacaaagtttaagctagtgttaataaattaaaaaaaattgcttgtctgtctacttcagctttgttttatgcccatttcatattgttgtctgtgttgtaattcataacttttgataccatttctgatgtgtaaaattggttgtcttgtaaatatcttataaagagttcaattgtaaataaactnttgtggctgtt

SEQ ID NO: 168 - DNA, 1360 bp; single-stranded, linear
  immediate source library: TBLYNOT01
  immediate source clone: 040550
gactctaatcaacattccttttgttggtgacatttgtgattttcagtaatctgagtttttgatggccttttaaacaagactccagtatgtgaagggttaattgctgtgctccacagatcttgtctattggcccctgtagaaagttaacctttgttgttttccttttataatttgcttattgcacaattgctttagggtaagtgaattatattaagatgccttgaaattatagcactccttgattaagaagctaaaatgtttctctcatttactccttaaacaaaagacttaaattagtttgggtcattattacttttattttgcagcatttggtttgttattagcgtaagagcaagtataggatatggagaggcccctggcttcatgagaacaaaggcaggcccaggttataattacagctttctcctgccccttctttactttctctaccacagttttctccactgtttgttttcctcttgccacaatttgctaacatttaaaaaattttcctgcacccagtagtttcatatcctgtagacatcctcttaggacattctcaaatttcaaaataaaaaatattcatctatgtagttaattaaagttaaagtttttgcagatcaactactcaaactactaaatacatttacctgagaaaaagtctctgagagcacttcattcctgttttagttcgtgtaaattctctgagaatgttctggagatagataactcatttacagtggtttctattaactaattaaagtacccatgattttttccttttctgctcagggatgatggagatttccttttaccttctgaggtagaattttttaatggggaaaataggccttttaaatattattgccagggtctgcaatataacttaaaattcctgtacatactgcaaatatttctttaaattgcacaggaaaatgagcgaactttttatttcttaatatctttggcaaaaaactttaaccagtaagcaattttataaccctgagggatcatcaaagatactatcctggattcctggtaaggaaaaatatattatttccttataacaaggcaaggagaaatgctattttattcctgataatttatataactagaataatttttttcctttcttttatggacctaaatctgccaattgggaattttgtgcatgaaatatgaagttactttttatagataatcagtgcttttaagtccctaaaaggctcctgctgaagtaatgatgatgttaataataaaagcctttgaaaggctgaaaacctacatagtggtaccatagtatttggagcttctataggagtggagaggggcagctcattgttgagagttgcatgctgca

SEQ ID NO: 169 - DNA, 1676 bp; single-stranded, linear
  immediate source library: TBLYNOT01
  immediate source clone: 040601
ggtgctgtggacttggagaaagtggccaatgtgattgtggaccattctctgcaggactgtgtgttcagcaaggaagcaggacgcatgtgctacgccatcattcaggcagagagtaaacaagcaggccagagtgtcttccgacgtggactcctcaaccggctgcagcaggagtaccaggctcgggagcagctgcgagcacgctccctgcagggctgggtctgctatgtcacctttatctgcaacatctttgactacctgagggtgaacaacatgcccatgatggccctggtgaaccctgtctatgactgcctcttccgcctggcccagccagacagtttgagcaaggaggaggaggtggactgtttggtgctgcagctgcaccgggttggggagcagctggagaaaatgaatgggcagcgcatggatgagctctttgtgctgatccgggatggcttcctgctcccaactggcctcagctccctggcccagctgctgctgctggagatcattgagttccgggcggccggctggaagacaacgccagctgcccacaagtattactacagcgaagtctccgactaggcctccagatcagggcttcctcaccagcactggcctttcttctacccacctctaaagctggcagtggagtctctgcctnanccaaaganttttcccttccanantttganngncntcccttnnagactttcccatctnctggngagatcggcgacgtgaggcgggcgttgctcgcgcgacaagtagttgctgggacagcgaaatggaggggtgtgtgtctaacctaatggtctgcaacctggcctacagcgggaagctggaagagttgaaggagagtattctggccgataaatccctgggctactagaactgaccaggacagcagaactgcattgcactgggcatgctcagctggacatacagaaattgttgaatttttgttgcaacttggagtgccagtgaatgataaagacgatgcaggttggtctcctcttcatattgcggcttctgctggccgggatgagattgtaaaagcccttctgggaaaaggtgctcaagtgaatgctgtcaatcaaaatggctgtactcccttacattatgcagcttcgaaaaacaggcatgagatcgctgtcatgttactggaaggcggggctaatccagatgctaaggaccattatgaggctacagcaatgcaccgggcagcagccaagggtaacttgaagatgattcatatccttctgtactacaaagcatccacaaacatccaagacactgagggtaacactcctctacacttagcctgtgatgaggagagagtggaagaagcaaaactgctggtgtcccaaggagcaagtatttacattgagaataaagaagaaaagacacccctgcaagtggccaaaggtggcctgggtttaatactcaagagaatggtggaaggttaaacagctttggatttattcttactttgtatgttgtgttgttgtccccagtgtcctacaaactaatgtatttgtgcacaagacatcatctatgaatgatgaagttttctcaccttcaaagtcttataaacatgttgactcttgttcctgctgagttacttgttcgaagcttacagcttgttttccgggatcgnntnactgttgggttgttct

SEQ ID NO: 170 - DNA, 1098 bp; single-stranded, linear
  immediate source library: TBLYNOT01
  immediate source clone: 040808
attcgcgaaacgaatcaggacgtcaaaaacaaaacaagcaaaaacacagaaaaagaaagtgcttggtcacctcctcccatagaaattcggctgatttcccccttggctagcccagctgacggagtcaagagcaaaccaagaaaaactacagaagtgacaggaacaggtcttggaaggagcagaaagaaactgtcttcctatccaaagcaaattttacgcaggaaaatgctgtaatttcttggggaagattttaatgtacacctatttgtaaagtcatcagaatagtgtggattattaaatatctagtttggaagaaaataatttatataaattattgtaaatttttatgtaaacagaaggtcttcaataagtaaagtaactccatatggagtgattgtttcagtccaggcaatttttctattttatattaagacttcatacatttatatatgtaaatatggcttattaatggaatgtnaaataaaatgtagaagccccaagaagaaagaagctcccagcattagaaggagatctacaagaaataccccagctaaaagtgaaaatgttgatgttgggaaaaccagcttttagggaaatccattttagtgccaaacgagggaactttcgatggtgatgagctctaagaaaaaacttacaaaaaagactgaaagtcaaagccaaaaacgttcattgcactcagtatcagaaggacgcacagatgaaatgacacataaagaaacaaatgagcaggaagaaagattgctcgccacagcttccttcactaaatcatcccgcagcagcaggactcggtctagccaaggccatcttgttgccggacctttctgaaccaaacaatgagcctttattttctccagcgtcagaagttccaaggaaagcaaaagctaaaaaaatagaggttcctgcacagctgaaagaatttagtttcggatttatcttctcagtttgtcatctcacctcctgctttaaggagcagacaaaaaaacacatccaataagaacaagcttgaagatgaactgaaagatgatgcacaatcagtagaaactctgggaaagccaaaagcggaacggatcaggacgt

SEQ ID NO: 171 - DNA, 485 bp; single-stranded, linear
  immediate source library: TBLYNOT01
  immediate source clone: 040940
accacataatgctggtctctttggacactgtcaaaatgtaaagggacctttacttttatacaatgctgaatccaaagtggttttggtacaaggccctcaaaaacaatggttgcatttatctgctgcccagtgtgttgcaaaggaaaggnggccattggatgctcatccaccccaaccaggagtccttcgccataagcaagggaagcaacatgtttcattcaggagggttttttcatccagtgccacagctcagggaactccggaaaaaaaggaagagcctgatcctttgcaagacaaatctattagtctttatcaacgattcaagaagacatttagacagtatggaaaagttctgattccagtgcatctaataacttctggtgtttggtttggaacattttattatgcagccttgaaaggagtgaatgtcgttccttttctagaactcattgggttacctgacagtgtggtaagcatcctgaaaa

SEQ ID NO: 172 - DNA, 815 bp; single-stranded, linear
  immediate source library: TBLYNOT01
  immediate source clone: 040996
atacgccatgccatagcttgtgctatctgtaaatatgagacttgtaaagaactgcctgtagattgtttttaaaaggtcttgaataagctccttgagaaagttgtggaaagccctcctcagtgaggatagctacaccatggccatggcgcatcagatagtctctgtgtacctggatttgtgcaatatgtaaaaatgtatcaaatgtattatagataaggtgttaggtgcaaaggatgtctaataatccctgcacacgttttgaacttgcagtgaagtacactgctgttccttgcttcctggggcacttttctcttggttagtgtttaaaaattatcttcgcttttttaatgtggcctcaaatgtcatgccaattttcacatcttccacaaactccatttagggagaaatgtttaaatctctggtataagtttactccataccagagtaaactatatattactctatataagcagtcttgcaataactaatcaccaccatagaagaaagaaacagactgcaaggaacagagttgagtgtctggagtcatcaaaggcattaaaaactccagtaaaagctggggccgtagcaaaaatcatgaaaaacacttcaacgtgtcctttcaatcatccaattaaatgtgggtagattaatgaaaatgtattacatcaatattaactcatctatagcactttgagtatctttgtagttcatgatatcctatcctataatgtggaggtaaatgattttatatgcattgggggtcatatataaaacttcaatgtaatttcactacaataaattgccttccttatttg

SEQ ID NO: 173 - DNA, 744 bp; single-stranded, linear
  immediate source library: TBLYNOT01
  immediate source clone: 041116
ttggagctacagcttcgagaatttgacagatgccggaagctttatgaaaagttcttggaatttggacacgaaaattgtacctcatggattaaattcgctgaattagagacaatccttggtgatattgacagagcacgggcaatctatgaattagccatcagtcagccacgtttagacatgccagaggtgctttggaaatcatatattgattttgaaattgagcaggaagaaacagaaagaacacgaaacctttaccggcggttgcttcaacggacgcagcatgtcaaggtatggatcagctttgctcagtttgagttgtcttcaggaaaagaaggaagtttgactaaatgcagacaaatttatgaagaagctaacaaaaccatgcgaaactgtgaagaaaaggaagagagacttatgctgctggaatcttggcgaagttttgaagaagaatttggaacagcttcagataaggagagagtagacaaactcatgccagagaaagtcaagaagagaagaaaggtccagactgatgatgggtctgatgcaggctgggaagaatactttgattacatctttccagaagatgctgccaaccaacctaacctcaaactcctggccatggccaaactgtggaagaaacagcagcaggaaaaggaggatgctgagcaccatccagatgaggacgtcgatgagagtgaatcctgatctttttttcatagacaaatgttttgttatttttataaa

SEQ ID NO: 174 - DNA, 3081 bp; single-stranded, linear
  immediate source library: TBLYNOT01
  immediate source clone: 041860
cangagcgccangccaaggagggaagagtcccagtgaactcggnccctcctcaatgggntttnccccaactnaggncagaacagtntttaatgtaaagtttgttatagtctatgtgattntggaagcaaatggcaaaaccagtagctttccaaaaanagcccccctgctncttcncnggggttcantnnggggatgcaaggggcccacttcaggtggaacaaacaggaatngntttggtgttgagggagttngccaccagctttaagtccagctcatttaagtttttttaaancttcaagtgttccaaattaaggggtccctgggggntaatcctaanaacanctttttttgtctttttaagattattggctcataagcatatgtatactggtttatggaactttattttacantnctctatcatgcaaaaaaattttgactttttagtactaaggntttaaattttaaaaaacaaaatctgtagtgttgacaaaatnaaataggttgctcttcttaccacttggggtttcacccngcangttttgaccaaggcangttggcttcggctttttcctgccctgtncaaggttctctgtttctgggcgtgganttgtggaaaaggagtttgaaggaccagcttttccccatgnggcacaacgagcgggaccgcaggatatacgccaacatgttcaagaagtttgcagagcaggatgccaaggaagaggccaataaagcaatgggcaagaagacttcagaaggggtcactaatgaaaaaggaacagacagtcaagcaatggaagaagagaaacctgagggccacgtatgacgccacgccaaggagggaagagtcccagtgaactcggcccctcctcaatgggctttcccccaactcaggacagaacagtgtttaatgtaaagtttgttatagtctatgtgattctggaagcaaatggcaaaaccagtagcttcccaaaaacagcccccctgctgctgcccggagggttcactgaggggtggcacgggaccactccaggtggaacaaacagaaatgactgtggtgtggagggagtgagccagcagcttaagtccagctcatttcagtttctatcaaccttcaagtatccaattcagggtccctggagatcatcctaacaatgtggggctgttaggttttacctatgaaactttcatagcactgcagaaacctttaaaaaaaaaatgcttcatgaatttctcctttcctacagttgggtagggtaggggaaggaggataagcttttgttttttaaatgactgaagtgctataaatgtagtctgttgcatttttaaccaacagaacccacagtagaggggtctcatgtctccccagttccacagcagtgtcacagacgtgaaagccagaacctcagaggccacttgcttgctgacttagcctcctcccaaagtccccctcctcagccagcctccttgtgagagtggctttctaccacacacagcctgtccctgggggagtaattctgtcattcctaaaacacccttcagcaatgataatgagcagatgagagtttctggattagcttttcctattttcgatgaagttctgaggatactgaaatgtgaaaagagcaatcagaattgtgctttttctcccctcctctattccttttagggaataatattcaatacacagtacttcctcccagcattgctactgctcagcttcttctttcattctaatccttgctattaagaatttaagacttgtgcttacaatatttttgacctggagtggatctatttacatagtcatttaggatccatgcagctttttttgtctttttaagattattggctcataagcatatgtatactggtttatggaactttatttacactcctctatcatgcaaaaaaattttgactttttagtactaagcttaatttttaaaaacaaaatctgtagtgttgacaaataaatagttgctcttctacactaggggtttcacctgcaggtttgacacgcagttgctcgcttttcctgccctgtcaagcttctctgttctggcgtgagttgtgaaagagttgaagacagcttcccatgccggtacacagccagtagcctaaatctccagtacttgagctgaccattgaactagggcaagtcttaaatgtgtacatgtagttgaatttcaagtccttaagggtaaacagattgagcatgggtctctattccctcagcctaagggaacactcatgggaatgggcatttggcaacccaaggaaccatttgcttaaacctggaacatctcacctttttaaatcctaaaaaacactggcagttatattttaaattagtttttatttttatgatggttttatcaaaagacttttattattagattgggacccccttcaaacctaaaaatcaagttatttccttttataatacttttcttccccatggaacaaatggggatcaatttgtgagttttttcctttaatgataactaaaatccctctaatttctcatttatgcttttgtcttttttatgaaatatttcttttaaaagaccccagtctcacctacgaaatatgaagagcaaaagctgattttgcttacttgctaaactgttgggaaagctctgtagagcatggttccagtgaggccaagattgaaatttgatactaaaaaggccacctagctttttgcagataacaaacaagaaagctattccaagactcagatgatgccagctgtctcccacgtgtgtattatggttcaccagggggaactggcaaaagtgtgtgtggggaggggaagggtgtgtgagtggttctgagcaaataactatcagggtgcccattaccactcaagaagacacttcacgtattcttgtattaaattcaataatcttaaacaatttgtgtagaagtccacagacatctttcaaccaccttttaggctgcatatggattgccaagtcagcatatgaggaattaaagacannnnnnnnnnnnnnnnnnnntcatttagatgcacttttttgtgtgttctttaaataaatccaaaaaaaaatgtg

SEQ ID NO: 175 - DNA, 1123 bp; single-stranded, linear
  immediate source library: TBLYNOT01
  immediate source clone: 042027
tggctttttccagtgagctattatgtttagtgtacagtgaaaagttttaatattataggttaaaattttcttaatcgttcttttctattcgcttgacangggngaatgaaagaacatggctgcttctcccagactgactgaccttggcatccgcataaagcatcattgttttcaaaaatgaagggtgcttaattgttcccttttttctatattctgtaggtctcataacaacaactgcagtctacagcttcttaaagttcagcgtgttaacctaacataaaacacagcaagaatctggttgtctgaactattttaaattaaggagccagatgtttttagtcaggctatcctgacaagacttgacctaaacttcgtttttattggtcataacagtccaattatattcttggccaattttgtccaacggacaagaaaaaagcaaagtcaacgacaccattatcttgtcaagatcagatggttttactattgtggcagaagcgagaaaactttgtttattgaaaaaaaaagaaaaagaaagcaagggaaaaagatactatggggtcaagtgtaactccatggaaatgccacgtctgctcttcagtgaagaagctggtttagggtctcacagaaaacttttgactgtatttatttattgttgcaaaaaagacgcttttttattgctgccctcatttgtcagctaagtattttttcttataaaatccagccccggttacatataatcatctgtatcttatcatgattcctgtaggtaaaagtacaagacgacctctagatgtcttttctttctatgaaaggagctgctatgtacacatgtgcacacacacacaactgggaatcaacaatgagtttattgttcatggtagattaaaattaagcttgcataaaggttgggctaagtggtcctggactacagactctgttgccttgaatataacagtacaatttgtcaattactctgcaccaggctaaagtgagtaaaatctatttgaaggtatcttgtttgtaaacatttgtcagattctaatttttttcttttgtattaaaattcaactatggatgtatatgaaacaaaataaatggagataatttttctcccacagac

SEQ ID NO: 176 - DNA, 603 bp; single-stranded, linear
  immediate source library: TBLYNOT01
  immediate source clone: 043386
tcccaaggagggaaacttctagtttgctgtcctttacctcacccctgtgaccacagcactaatttctcatgaattcttgttaccaatgagatacaaatgtttggggagctctggcctggtctgattttgagctctgtggaaatacgcagaccacgggggaggaggccgggaaatggactcggtttgagggcttgctcaaggatgcggttttgtttttcggctgatttactccaagacagccagagattgttctgtcgttggccacagaggtgactaaacaggaaggtaagtttgaggtaggaagaaaaccatccccaggagtttcatgtagcaaagaaggaagtagctgttacaaatgggtgacagtttacatgtgggtctaacagtctcagctctgttgttcaatctttcagttatactcagagagtaagcgggaggagccttggggctgctattgagtgcagcatcctgaaggctgttcttcaagtgttactcagactactatcccaagagcactcaaggcagttcttcctccatccctgctccctagctcccttggctttgatgagtttattacaaaagggctattcactttagaatagt

SEQ ID NO: 177 - DNA, 427 bp; single-stranded, linear
  immediate source library: CORNNOT01
  immediate source clone: 045328
ggcaaataaaaggtcattttaatttagctgcaatttcagtgttcctcactaggtggcatttaaatgtcgcctgatgtcattaagcaccatccaaaaagtctgcttcataatctattttcaagacttggtgattctgaaagttttggtttttgtgactttgtttctcaggaaaaaaaatattcctacttaaattttaagtctataattcaatttaaatatgtgtgtgtctcatccaggataggataggttgtctttctattttccattttacctatttactttttttttgtaagaaaagagaaaaatgaattctaaagatgttccccatgggttttgattgtgtctaagctatgatgaccttcatataatcagcataaacataaaacaaattttttacttaacatgagtgcactttactaatcctcat

SEQ ID NO: 178 - DNA, 1609 bp; single-stranded, linear
  immediate source library: CORNNOT01
  immediate source clone: 045451
gcagtgctgtaatcggctcccgcttgctctcctggagcaagctctgccctggctgtgggtatcaggactgtgaccaaagcatttctagtcccttctctctttctaaggacccaaatttccctgggggcatcctgcttcctgaaagctgttggatttcagtgattttnccccccaccccccagcacaggagagcacccacagccgcagaaggggaatgtgtcctcctgctctgcttcctcagggcccagcaggcgggggtttgagccctggaccccaggctcttagagactaaggggcagctcctgaccaaagacgatacagcttggcactttaaagcattaacagcaggtgtgaccctgagggctcctccatggtgctgcattgagtccagctttccttctgcccttcctccaggagaaggggcccaaggtccccgtggatggtctccacctgtgcttggaaccagtgtaactggctgctccctgctcccagggactgacacggggatcatctctgtgaccgccctccgtcgggcccctgcctgccttctcccctccacgcaaggctgtgctcttcctctggtttctgtgtgtccgtttgagtgtctgcgccccgcctccccatacttcctgggatgatgtgtgaaacctgacacctagatttatttggaaatattctatgaccactttacagatgaggaaactgaggcctcaagcgtggaggggtagagtgaagagtagaacccaggtctgatgccaaagctgctttcttctctgcctcctcctcacgcaactcacacctcctttttttctagctttgttgtcctcccaggaaccaaaaaaccccagctattttctgaccaaaatgtgtttcataacaaaccatctggtgcctttccacacagaactggcaggagcctcgtgtcctgctagctgtctctcttgttgatttccgtgaaaatgcaagtgtttgaagtctgctcattccgagggtgaaacaaaatccaaccctgtcagaatcatgctgttctctttgctgacactgtgaccctgggtcgggacagaccagcagcaatctgtctttagaatcgctttccttcctccccttttgcccccgtggggctcccggcatcctgaaagccagcaaagcctccagcatcttttccatcctgaggtgcctcccagtggcctggcttgtcggagcaagtttcatcagccctagggaaaacacggccctcctgggaacctccttacctggagtaaccggacaccttagacggaggtgcctgagggtggggtgggatttgcagggtcattatcagaacatgaggataacttccttgcccctgctctgtagccacctccttggcaccggcctctatttgtcataaggcggcgtgggcgaggcctgacacaggccagccttggcacgaggggggccaggggttctgagaagcgctgccctgtgagagccatgctggccttcgtctccatctttggttgacggggttttcccnntngccccccngttttttanaaaaaaattttctgggctttattttgnaatttatngggggaaaacaaatatnaatgttctcgttttgnaactc

SEQ ID NO: 179 - DNA, 1521 bp; single-stranded, linear
  immediate source library: CORNNOT01
  immediate source clone: 045454
aaattctncgctgaccagtntcggagctggtcagcagctgtgagaccccactggcttttgccagcatcccaggctgcacagttatgactgacctgaaggatgcaaaggctccacctggttgtctcaccccagagagaattccagaggtccatcacatttcccaagatcctctgcactacagcatcgcgtcagtctctgcttctcagaagatcagagaactagagtctatgatcggcatagacccagggaaccgggggattgggcacctgctctgtaaagatgagctgctgaaggcctctctctcgctgtcccatgcccgctcagtgctcaatcaccacctgggttccccacacatttcaatcatgagcctccagaagagacagatggcccaccaggagctgttgctctggttgccttcctgcaggccttggagaaggaggtcgccataatcgttgaccagagagcctggaacttgcaccagaagattgttgaagatgctgttgagcaaggtgttctgaagacgcagatcccggaagctgctcaggcattcctgtgcaaaaatggggacccgcagacacctagatttgaccacctggtggccatagagcgtgccggaagagctgctgatggcaattactacaatgcaaggaagatgaacatcaagcacttggttgaccccattgacgatctttttcttgctgcgaagaagattcctggaatctcatcaactggtgtttctaactggggaggctatgccctggcctgcgcactctacatcctgtactcatgtgctgtccacagtcagtacctgaggaaagcagtcggaccctccagggcacctggagatcaggcctggactcaggccctcccgtcggtcattaaggaagaaaaaatgctgggcatcttggtgcagcacaaagtccggagtggcgtctcgggcatcgtgggcatggaggtggatgggctgcccttccacaacacccacgccgagatgatccagaagctggtggacgtcaccacggcacaggtgtaaccgtccatgttccgtgtgagcagagtccctaccaacgggcaggtctgcatccggggagaatgcagctgcttctggcgacaatcctgctagtaaacactggtcttcggtgagcaacgaacactcgcctggcctgggaaactgcatgcccactttctgggaggggttagtgcaagtgccgtggacaaaggacaacatttctctggggctttttaacttttattcctaagactctaaaggcgttgatttcaaccctccttcactctggcttcttcaggcaacccacgtggtctcctgtgagaatcttctcgacagttacttatggggacacttgtgaacaattaactgccaggcagagcatgagaacaaacattcccaggccatgtaggataggatactccagactccagtcatcctcccccatccatggtttctgttactcatggtttcagttactcatagccaactgcagaccgaaaatactaaatgaa

SEQ ID NO: 180 - DNA, 2332 bp; single-stranded, linear
  immediate source library: FIBRNOT01
  immediate source clone: 052437
gttcatacagaggagatataactcatttagatcttctgacaaatcctagtgttagttttatctgtggaggaaagacatttaataataaactgtttgggaatcttggtgaataaagattcattttcaagctgaataaccatacttattttattttaagttgccatttggggaataattgcagtatgtgtagagactctcttgggatgcacttatatttttatttaatgactacttgttttctagttttgcccacaacgtctgaaaccactaagacattcaggagcatgttgagcttctggtttggaaacagcaagacccaccatttatgacaaggacagccatgaggttaatacttggagtttaactgccttccctttgaactagttaaaatctgtaagaataaggaagttgttgaaggcttaaaatctgggttctgaaaaagtagtttcagtttataggatacacatttactcactgagctccagttccaatactaaattagacagtatcatatagacggaaaatgaaatgctagaactgccgttctttggatcgccactctatgggggtctgtcttttaactactctcctggttatgttggccttacaccactgccatttgatttaaaacgctgcagacactttatctgcaaatgtgttccagttgttatcagctacctactacgcagcttcagcgccagtgtgaatttatttttttttaagtgccattaccgtctcctctgttcagattttgacattcaggaaaatatttttattttgatgccatactgaaatctacaatgtgcggcgggctgcccgcgcgctgcttgccttggccaaggtggacgagaaccactcagagtttactctgtacgaatcacggctgttggacatctcggtatcaccgttgatgaactcattggtttcacaagtcatttgtgatgtactgtttttgattggccagtcatgacagccgtgggacacctcccccccccnnnnnnnnnnnnnnnnnnngagaacttagaaactgactgttgccctttatttatgcaaaaccacctcagaatccagtttaccctgtgctgtccagcttctcccttgggaaaaagtctctcctgtttctctctnctcnttcnncctncnctccctccatcacctcacgcctttctgttccttgtcctcaccttactcccctcaggaccctaccccaccctctttgaaaagacaaagctctgcctacatagaagactttttttattttaaccaaagttactgttgtttacagtgagtttggggaaaaaaaataaaataaaaatggctttcccagtccttgcatcaacgggatgccacatttcataactgtttttaatggtannnnnnnnnnnnnnnnnnnnnnnnnnnnattctgaaggacaaaaaaggtgactgctgaactgtgtgtggtttattgttgtacattcacaatcttgcaggagccaagaagttcgcagttgtgaacagaccctgttcactggagaggcctgtgcagtagagtgtagaccctttcatgtactgtactgtacacctgatactgtaaacatactgtaataataatgtctcacatggaaacagaaaacgctgggtcagcagcaagctgtagtttttaaaaatgtttttagttaaacgttgaggagaaaaaaaaaaaaggcttttcccccaaagtatcatgtgtgaacctacaacaccctgacctctttctctcctccttgattgtatgaataaccctgagatcacctcttagaactggttttaacctttagctgcagcggctacgctgccacgtgtgtatatatatgacgttgtacattgcacatacccttggatccccacagtttggtcctcctcccagctacccctttatagtatgacgagttaacaagttggtgacctgcacaaagcgagacacagctatttaatctcttgccagatatcgcccctcttggtgcgatgctgtacaggtctctgtaaaaagtccttgctgtctcagcagccaatcaacttatagtttatttttttctgggtttttgttttgttttgttttctttctaatcgaggtgtgaaaaagttctaggttcagttgaagttctgatgaagaaacacaattgagattttttcagtgataaaatctgcatatttgtatttcaacaatgtagctaaaacttgatgtaaattcctcctttttttccttttttggcttaatgaatatcatttattcagtatgaaatctttatactatatgttccacgtgttaagaataaatgtacattaaatcttaanaaaaancnaaaacaaa

SEQ ID NO: 181 - DNA, 1602 bp; single-stranded, linear
  immediate source library: FIBRNOT01
  immediate source clone: 053209
aattagtcagccatatttattttccagaggtttaagaaattgctgtttttaactttttgaaaaaacttaaatgccaccaaactcatgtaggttggcactgctttattgaaccaataactgttggtatgcactttgttcagacacactgtgtactttttcaaaaactagtttcatgtaaagtgattggaccccatagattagtggaaaaagctgattaaccagctactcataggctgctaattcattcatgccaatgttttggtttttcagttttgcctccgtgataaattaaagaatggggaggggtgaaggaaggggaagaagattgctttagaacaagtggcatgaaattaccatctttgtagaaaccgcagctaacagtgggagttatctaagcaatcagatgttacagggccagccctttagctgctgtggtgtattctgttgggtagtgaggtagtaggtactttatagacttttaattttggaaattgatgacatccctcaggcatgtattctggaaatggaattcctgtaacttcctgtgtctgcagtatgccctacaattagtaggcagcgtgtaaaaacactagtgtagattataaagatatacattaaaagaggaccagaaatacttggtattcagtggcacagaaagcaggttaaacaaacaaaaagcacagtgttacgcttgcaagtttccatttgttttaataccacgcaatctttcacactcgtgcgtgtgcgcgcacacagagcttacctgacttgctctgcttgagtcatgcagttacaaaaaaaaaagacatcttgacacccacacaatattctaatcaaaacctttcagtttcaatctggatatttaaaaacattggcagaagcttctgtgagtttagttccactaagatgtttcacctgccttatcaagaccattctcagtctacttttttaagctaccgtatcttaaattattgaaaatttattaattgctgaatatataataacctttgcttgttatgtaaccgaaaatggtttaagagccaacatttagagtatgacaatggagctgaacagtttttaatgcgcaagcagtttctgttcttgtgtatgacttgtaaccttaatttactgtgtaaagatggttacattatttccttagctttgtttgttggagacaaatagagaatgcttgttaagtatgtcaaaacaatcttatcttgtgaatttttgttaatgtattatacgggctatatttttcatttgcccagaaagacagcttgtataacgcttttggaagtttctgctctgtaatgtctttagagctgacagtctgttaggtttgtttttttcttcatgctaaagtgtcagttggtggttttgtgaactggtcaaaaattcacaggtcttacatgttttgggggaaatttatattggacactgctctttgtctagcaaataaaagatgttaatatattcctgttactggcatgtgcacgactatgttattagaagccactttatcattttcctgctttaaatagaaatgtctatttatgaattctgcttgtagttttttcacaaataaaatagtanaatttaaaa

SEQ ID NO: 182 - DNA, 847 bp; single-stranded, linear
  immediate source library: FIBRNOT01
  immediate source clone: 053532
gcctcctgatccaggactggcaggattgatcccacctccaagtctccgggccaccttctcctgggaggacgaccatctctacccctagaggactgtcactctagcatctttgaggactgcgacaggaccgggacagcaggccccttgacagcccctcccacaggatgtgggctctgaggcctaaaccatttccagctgagtttccttcccagactcctcctacccccaggtgtgcccccttagcctccggaggcgggggctgggcctgtatctcagaagggaggggcacagctacacactcaccaaaggcccccctgcacattgtatctctgatcttgggctgtctgcactgtcacaggtgcacacactcgctcatgctcacactgcccctgctgagatcttccctgggcctctgccctggcctgcttcccagcacacacttctttggcctaagggcttctctctcaggacctctaatttgaccacaaccaacctgggcttcagccacatcagtgggcactggagctggggtgcacatggggcctgctcaccttgcccacacatctccagccagccagggccctgcccagcttcaatttacagacctgactctcctcaccttcccccctgctgtccagagctgaacatagacttgcacttggatgtcacctggagtgtcacatgggagtgttatggcagcatcataccaaggcctactgttgcacatggggccaaaaccagtaaacagccaccttcttggaaagggaatgcaaaggctttgggggtgatggaaaagaccttttacaaatgataccaattaaactgccctggaaagggcataggtggg

SEQ ID NO: 183 - DNA, 1955 bp; single-stranded, linear
  immediate source library: FIBRNOT01
  immediate source clone: 053537
ggcttgcggtgctgtccacatgaacgacacatacatgtttgctgtgaaacagncttcattgcacatcttttgggtcgtgctgagccagagttcgcaggagggtatntaggcggaaggaggaaaaaggcatgcaaaaggaccaataggatattagctcaagaagaagttctgacctgcttgggaattcatctttatgaaagnctgcatcggatctggcagaagctacgggcagaagtgagccagagttcgcaggagggcgaagagaaaggcatgcaaagacaatagatatagctcaagaagaagttctgacctgcttgggaattcatctttatgaaagactgcatcgaatctggcagaagctacgggcagaagagcagacatggncagatgcttttctatcttggtgttgatgctttacgcaagagttttgagatgaccgtggaaaaagtacagggtattagcagattggaacaactttgtgaggaattttcagaagaggaacgagtaagagaactcaagcaagaaaagaaacgccaaaaacggaagaatagacgaaaaaataagtgtgtgtgtgatattcctactcccttacaaacagcagatgaaaaggaagtaagccaagagaaggaaacagacttcatagaaaatagcagctgcaaaggcctgtggcagcactgaagatggtaatacttgtgtagaagtaattgttaccaatgaaaatacatcatgtacctgtcctagcagtggcaatcttttggggtcccctaaaataaagaaaggcttatctccacactgtaatggtagtgattgtggatattcatctagcatggaagggagtgaaacaggttctcgggagggttcggatgttgcctgcactgaaggcatttgtaatcatgatgaacacggtgatgactcttgtgttcatcactgtgaagacaaagaggatgatggtgatagttgtgttgaatgttgggcaaattctgaagagaacgacacaaaaggaaaaaataaaaaggaagaaaaaggaaaagcaaggtactgaaatgtgatgaacatatcccagaagcttgggaagctgtattacagatcccaggtaatcgaggagacctcagggaaatacccatgcacacagtgtttcaccgtgacaagaccaaaggatacacatcctgaaagctgttgcagctctgaaaagggtgggcagccattgccttggtttgagcataggaaaaatgtaccacagtttgcagaacctacagaaacgttgtttggtcccgattccggaaaaggtgccaagagcttagttgaactccttgatgagtctgaatgtacttcagatgaggaaatctttatctcacaagatgaaatacagtcatttatggctaataaccagtctttctacagcaatagagaacaataccgacagcatctgaaggagaaatttaataaatactgccggttaaatgatcacaagggggcccatttgtagtggctggttgacaacggctggagcaaattaaataaataaaatagctctgtctttcaatgaaacactcacgatgactactgcgccttctctttcgaaaaactcttaatttagtgacttatggcaaaattttatcttaaatcaatgtggattctttcttgttttgggagacggtggaggtatcctcattagttctttcttcaggcttgtgtctttagttgcgtggctgcgcaggcctgccatatgatttaagccatctcttttcattaaatgtttctcttcctgtgagacttactaaagcaacttagtggcaaaaagtaatgttgtacttataattctgtacagaaatgacaatgagctgaatatatggttttacaaagtagacatccacttgcaaaatgtttggatgtaatgttaaagcgcaatgtgcaaaatttaaaataaagaatatttattaatacgcacagtaaaa

SEQ ID NO: 184 - DNA, 1946 bp; single-stranded, linear
  immediate source library: MUSCNOT01
  immediate source clone: 057310
cttcagttttattctcagtatagattgccagtattgttaagagtatccaaaggcctttctagatggagacagaataactgacttgaacatacagtgtgcctgtaagtgtccaggctcagagctggtgaaaacccttctgttgggcgtgtgcagggttaaactcctgaagtaacttgtgaggacttcagtgcttgctggtgtcctgggcagcaccatgaatgcctttaccaagacatgccaagttggatcccccgaatgaagcagatgtggctgtggtgtgacccttgctccctgctacacagagcatcgcagggctggcctgtgtggtttccagatgagggtctgggtcccggaagcttgtgttgagagctcagtggacccaccccgcttgctgaaccctcacagttcttggggttgtccagcctggacttgtagcacacatgtcctgaagcaaagctccggtgactgcatgagccacctggccacagtcctcccatggagggcctgccgtgacgctcagtggagagggcagggcctgtgtctccacttaggccacacagtgatgaggaaaccacagatggagcttcttgccgataatactgactctagcccatgattgccttgcccaagccaaagaggaaggttaggttggcttgtcgagcccttgagcgttgggagatggggtgggaaggaggtgagcccctgcagagagttgggtagtgtccttcaggaatgaaaggaggggcaaaggagtcaccagaggtcctgcatttccatcagggtttccacagtcatcagggcttctctcttgagttgctgataggagatgtgagttatgcccagagatgtcttatcgtgaggaaaaagaaacttccttttgttcacattcaggactctcagtgccatatgaagtagcaaaaggcagtatcggccagatcagtgttacattgattctaaaattacagtgtccccattagacaactattttaggtgctggagtatgtttgaagagtgtgctgggaaaaaggaagcatttcttcattgatttaaatcagtatgaatattatatgcctaaataaaaaatttgcacaggtaaattctctcacttgtgaatgggagaagctgccccagggaatctgtgaggatggtattccctggagtctggctttgaaagatttcattgttggtagaaataacaggttgagaaagagggagttagcatcacctaaaacctgcacgtgaacaagggttgacatgatacactatggccttagaaaagggccaggtgaaaccccaagctaatcactgcggtctttcagagccggacagacaggtgccagcagagcccggggctcactctcctttcagtcattcctcagcccttcgaagggaagcccaaacactttgcacgctgtgctgcagacattctggcctcgtgtgtctgaaagttgcatcagtcctcacggtgcaaacacagttgatttaggaagtcacacaatgacactgaaatcctacagaccaaaatccacttgtcagcaggagcagcagcccaggcccagcaccagcggtcttccggctcctctgagggctgccacgttgggcgaggggagccatgccaagggtccaggctgctttaggccatctgtgccccactcatctggggacagatggtttttctttattgtaaaattgtggacttttaaaacctgttgactaaacagtaattaatttatatttgtgaaaaatgccactgtcctagtgatttctgatgtaaataatgttgtttatatagtatgtattaaattttcctacattgtaaaactgctgtacttttgattcttgtatattaaaaagtgttactgagcatttttagaaaaaaaaagaaangaaaaaaananaaaaanganaaaanatggggngaannnccgnnnccnnagnaaaaaaaa

SEQ ID NO: 185 - DNA, 825 bp; single-stranded, linear
  immediate source library: MUSCNOT01
  immediate source clone: 059081
gttgaactttgaggtttttctttaagaatgagcttcgtccttgcctctactcggtcattctccccatttncatccattaccccttagccattgagactaaaggaaatagggaataaatcaaattacttcatctctaggtcacgggtcaggaaacatttgggcagctgctcccttggcaggctgtggtctcctctgcaaagcattttaattaaaaacctcaataaagatggccctgcccacactgtgccttgtgtttggggcttgatagagtgtgaaaggtgtgttgctggggtgggtaggggggtgaacctggagggggaggggcaataggtgaccaggggacaagggaggagaaggcccagggtgtgaatcaggaggtcaagtgagtgaggtgcagggcatggaggaggtcatacaagcaggcctggcccagtggtccagacagaagggcctggccttgccctgggacagaaccagaggccatcctgatgttccctggagaaatctcacctcctcacccaccaggccattggcccagcctgccggaagctgcatgccagcggagcccagccctgctgcccactaccaccagctccatgtgcacctcctagactcttggttcaccagcacacaggagaagaagcataaatgaagcctctttggggtgaagcctggacatcccatcgaatgaaaggacactagtacagcggttccaaaatcccttctggtgattttagcagctgtgatgttggtacctggtgcagaccaggccaaagttctggaaagctccttttgccatctgctgaggtggcaaaactataaatt

SEQ ID NO: 186 - DNA, 1641 bp; single-stranded, linear
  immediate source library: LUNGNOT01
  immediate source clone: 059846
gggagccgcaccgcgccagccgggctgcagcggccgcgcaccaaggctgcgatggggctggagacggagaaggcggacgtacagctcttcatggacgacgactcctacagccaccacagcggcctcgagtacgccgaccccgagaagttcgcggactcggaccaggaccgggatccccaccggctcaactcgcatctcaagctgggcttcgaggatgtgatcgcagagccggtgactacgcactcctttgacaaagtgtggatctgcagccatgccctctttgaaatcagcaaatacgtaatgtacaagttcctgacggtgttcctggccattcccctgggcnttcattgcgggaattctctttgccaccctcagctgtctgcacatctggattttaatgccttttgtaaagacctgcctaatggttctgccttcagtggagacaatatggaagagtgtgacagatgttatcattgctccattgtgtacgagcgtaggacgatgcttctcttctgtcagcctgcaactgagccaggattgaatacttggaccccaggtctggagattgggatactgtaatacttctttgttattataacataaaagcaccactgttctgttcatttcctagctgttctaattaagaaaactattaagatgagcaaccacatttaggaaatgtttattgacaggtcttttcaaataatgcttttctaattaatagccaaagatttcatatctaactttgtaaccagaattatacagtaagttgacaccacttaggatttaaaggcagacagttttgctttagtacaatagtatacattttataatgatgaacttataatgattaagggacatttctataaaaatactacaatagttttatgcacaacttcccattaaaaatgagatttcttatttgtttgtctgtttttactctgggagtaatactttttaaattacctttacatatatagtcactggcatactgagaatatacaatgatcctggaaattgcagtaacaaaagcacacaacgattatagtaactataagatacaataaaacaaataaatgtgaaagtagattcatgaaaatgtattcctttaaaatattgttttcctacaggcctatttaacaagatgtttcattttactgtatattttgtagttaatataaatgttgctctaatcagattgcttaaaagcatttttattatatttatgttgttgaactaatatatgaaataagtaaatgtagctcccacaaggtaaacttcattggtaagattgcactgttctgattatgtaagcatttgtacatcttctttggaaataaaagataaaagagcgatacacaaagctttcttttctaacttttccaagcaaaatctaaaatgttttatgacatttttctggctgtgatcttaaaataattcatatctaaatagtattttgtctaggagatgctttctctctagtagttagaaattaaatctgtgtcagcattgctattaatgtctcactttactttcaagtaatattggtgctatttaacattttacagtaaatgttacttctgatactttagtacaatttcaactacagtgattcatgtagagagacaggggagttgtcaa

SEQ ID NO: 187 - DNA, 1411 bp; single-stranded, linear
  immediate source library: LUNGNOT01
  immediate source clone: 060269
tacattgaaatctgttcttacataatagagaacagggctattgaataaagacccaatcctaccaganctttagttctaaagggcaacttgactgtgagtaggagggcccccaagaaagggaggaaagtccacacccagctaaccacacaacagggcttcattatggaaatattttaacaaaagtacatgttattaccaaccaaagagatgcattgtgcaatagaagccttccttaaaaacaggctaaataacctcattttatgcagcagtttaatctgagaacagagggaaaggtgtgcagtggttccagaggggccttatattctatttttagtctagatattttttgtttataaattcccaaggaattgttaacactttggggacacctaatggattctttttgaaattccaaggtgcttcagttctttgcccaagtgaactgtgccttttattgcaatttctgttcgtctcttggtggctcttctgactttttggagaatacccatcttgttggaggcagacttaagttgttatgctgtgccacacaatttactgagacaatcatatcttcctaagcatttaaggaaagttgaaaaaaatagaattagctataaaatatgtatggcacatcttgtttaattttgcatgtaacttctcttttgtacattgatgaggttttagtgacattgtcatccaacactttacctttattgttcagggaatgccttcgtgattttttgtactggttttattattcagactatggcctggatttgagtatattgttattaccacctggttttttaattattcatcccagtaaacttatattttgtgaagcatttgtttctcagattaagacactgttagaacctaaagtagtagctgatgggtatctgtgaattgntttnatnangngnntgttacttgaagtagattgtctgaataggcatcctcatctatatttacccaaaacctcgcttactgtcatgtgcactacaaattgcaatttggaaacctactgtattgaaattctgtcagtttatggttcttgaagactgatgtcctttcccaaacactggttactgcagcagcatttttaatgtgtaagtgaagaaaaaaggccactaaggccaaagattttttaagaatcattgtacaaatcattatgttaaactatctaagctttgctgtaatactgttttctcttcaatatgtgatggtacaggaaggatgttaaatgaaggggtggtattgcaggagagcattttaaatggcagaagtaaaaagttataatatttataattttgatgggtttaagtttatttttgtagggaagatttttctcccctaaaatagtttctagaatggcaaaattgtttccattattaaaaattgaagttattaa

SEQ ID NO: 188 - DNA, 2627 bp; single-stranded, linear
  immediate source library: LUNGNOT01
  immediate source clone: 060309
ttagcaaccatgtttcccaggagggaatttaccaaagaagattataaaaagaagttactggatttggaacttgccccaagcgcttcggtggtactnttgccagcaggaagaccaactgnatccattgtacactcttccagcggagacatttggaccttgttgggaacagtgctttatccattccttgccatctggagattaattagcaatttcttgtttagtaatccgncttccacacagacttcagtgagagtaacatcgtcagaacccccaaaccctgcatcatctagcaaatcagaaaaaagggaaccagtgagaaaaagagtgctggaaaaacgtggagacgactttaaaaaggaggggaaaatttatagattaaggactcaagatgatggtgaagatgaaaacaacacttggaatggaaattccactcaacagatgtagtgtgacaagtataatatgtgcaataatcattgtttctcttatgatttaattcaactaaaattctactggagaagtgggactgctttatattttccaactggtctataaaatgtctctttattcctgcttagtgggtgtgggttgaaggtgtttaactcagaaaagtaaagacaggaaataactctctgctaggtccttgcttatatggcaaccactgctagaaccctaaaagaaccaaaaatctgccacagcctgcctccatcagcttcttatttagtatttcatatgcccattagccctatgcttcagatgacacgttttgtttagagctactttgctccaagactcttaagcccaaagtaactggtatgtcactgagtaacttgactcggtgtcagagcattttaactagccactcagaatgagaaatttatgtttaacttctctttttactcatcagctgcaagcaaaatcttgtagtttttaatcttaaacactgaataaaaaaactttcccctaaattggaatgatcttagttttgctttgagttttgttatctagcatctttttgttgcacagggctctattgaggtcctatgtctctaatggttttttttccccagtattgccctgggagctgtctctggaaagtagctggcgaggttaccttaactatcactgaagaaagaaattttctgacacactgatggcatgtgacttgtctcctaagtcagtgaggcatcactttgtttgcataaagtatacggtttgttaaggcctttgttcttgtgagatgcaaaacagctgctagtctgcaacctagttttccctctcacctttaactgacgttttgtcctcaataattacacaaggacctagagtacctataggacaaaaagtatagaataaaaatatgcctttagtcatttggtttttcttaaaaagttgagattcttggtctgncttgcgtgttgctttgtccgtatgtctttgttagtggagaccgctaaactaatgatgtttgaaaacagttcctctgttttagattggaagatagcactctagagtggacatacggaaagactgtgactttattttgtaatgggaggaagaaattttctcagagcaaactttctattttttacctgtgaaataacagtgactttttaaaatggtgacagtgttggcaaggaaacagcaacacaggctgcgctgttggtaggagtgaaaaccagtataattcttctgaaaaacatttatcagaaacttaaaatatttcataccgtttgatccagtagcttcttctaaatcataaatgcagacaatgtttaggtaaagacatactcattaagtgttatttattttactcaagaactggaaaccaactaaatgccttctatagaagtaatttttgatgaggagaaatggtacaatactaattaacaacttggtttaacatgtttactgagcatctgttaagtgttgggggaaaaagcagcaggatccagagctataggtacagtgtgatctcagctttgcaaacacattttctacatagatagtactaggtattaatagatatgtaaagaaagaaatcacaccattaataatggtaagattggtttatgtgattttagtggtatttttggcacccttatatatgttttccaaactttcagcagtgatattatttccataacttaaaaagtgagtttgaaaaagaaaatctccagcaagcatctcatttaaataaaggtttgtcatctttaaaaatacagcaatatgtgactttttaaaaaagctgtcaaataggtgtgaccctactaataattattagaaatacatttaaaaacatcgagtacctcaagtcagtttgccttgaaaaatatcaaatataactcttagagaaatgtacataaaagaatgcttcgtaattttggagtaggaggttccctcctcaattttgtatttttaaaaagtacatggtaaaaaaaaaaattcacaacagtatataaggctgtaaaatgagaattctgccccctcacctcttaccccagtactattctccagaggtaatctattaacaatttcttatgtaattttcagaaaatttgtatgcgtatataagcaaatatgtaatctttattttttaaataaatgggatcatattatatattctaaaa

SEQ ID NO: 189 - DNA, 2874 bp; single-stranded, linear
  immediate source library: LUNGNOT01
  immediate source clone: 060779
tgggtttaccctttcaaagtcagcctgatcttattggagacaagtatgtgataagtatttggatttgagagtagacctttcatagtgaggcttatcaggttgaggggaggtgatgactggaaatatatttatttattttaaatcccactttggctttagtaaaatctgaatatgtgtgcatttctagtttcttacaccaaatgtaggttccgtaagttcatgcaagtacagtgggtcttggatcactgaagtctgaattttatattagcaactgaaaagtttactgtggcctctttccttctgagcaggttagtaggagggctgctttccctcagcctggattactgctttgtcctagaagatgaagatggcatatgtggttatgccttgggcactgtagatgtgaccccctttattaaaaaatgtaaaatttcctggatccccttcatgcaggagaagtataccaagccaaatggtgacaaggaactctctgaggctgagaaaataatgttgagtttccatgaagaacaggaagtactgccagaaactttccttgctaatttcccttctctgataaagatggacattcacaaaaaagtaactgacccaagtgtggccaaaagcatgatggcttgcctcctgtcttcactgaaggctaatggctcccggggagctttctgtgaagtgagaccagatgataaaagaattctggaattttacagcaagttaggatgttttgaaattgcaaaaatggaaggatttccaaaggatgtggttatacttggtcggagcctgtgacatttgttgacactgtgaactgtccaaaagtctcttaactgcaccttgtgaatggtagttgaggtcttcatacagttcagcctctagaatggtaacaaatcagccaattggattcgaaacaaagaagactatgtaaaactcacccatcacactttgagactactcactggttggaagaatatagtattgcagcaaatcctgtatgaaagagagatgtgggcttcctttttgagtcttgtgttaggtgctgagaccttttacatgggcttatacagggagagagtcttcaataaatgtagtcagcactattttctgcatccagtgtggttgcgtttctcacctgagagtaatcaagataacatctgtcatcttccttggtttattgagtgaaatgcctctcagtcttaggggacatggcagagatgaaaggaaagaaagagtgggtttcagaagtgtcagggtggagtgattccaagtgggatggttgtggcattagtttaagctgaataaataatttcaatttggggcagttattctgctttttgtaaagccgtggccaattgtctcctgtaatgactgttggttcaggcatgttgtactttgtagggacaaatgtgcatttgtttgtggcaaaagcctacaattgacaaacttgtaaatttctttgtatataaactagctgtaacctgactatcctttgtgtttactgtttttgtaaatttttttcctctataaatgaaagggtgttggttcagaatggcactttgaataatgtaaaccagtgaaaagtggattttctttacttttgtctttgggtttggggttgtttttgttctttttgaagttttattatttttaaagtgcctcccacctaggcgtaggccatgaccatttggggtacgagagcctaaattttgtaggacttaatctgttgaaaagtgcagttacttctggaaattaacctcaatattaggtcagcatgtgaaatgttggatttgacatgtcaggtagggttcagggactgattggtcccatttgccctcaggtcagttgtttaatctcaagacctgttactactgattttattaaatcagagtctttaattcttgcatgtttgtatctaatttctgaacgaatgagcacactttaaccagttatttacagttacctttttcctttaaccggattgtgaaagcttcatgtattttaatttagattctgtgtttttaagggttctgagcatgaagctggcagatagtcggcaggactcattttttcatcatggctggctgatttctccatagattgataacagtattttgttatcttgcttctctgtagttttgcatcagctgtttaactttgagctgagtgaggggagaggggtaaagagaaagaaacttaagttttccctttcacagaactccaccattgtgggctttgagagagccctaaagcattgtacctagtggtacctagtgacttccaaccaaagcctttgagtatgcactaaataggtgagaagaaaggagagaaggtttttaggttagaaacctttaaccgatagaaggatatggtatgttgtaaaagctggaaccaagtttgcaatttttgagggcttgaggatgaagggaagactcttaccagatagtaagacagctgagttttcctcagttttctcgtcttaacactagtggacaattctagcattttgtttggaggatttcagagttaacctcatggaattcaggattttttagcaagtttgcttttggttttatcttggcttttagtaatcatgttggctggtctggtcacaggtgactgtgaaacagatgccctggtcttgctttcatcactctaggatcatgaagtgctatgctatttcctggttatgaatattaaggttggaattacatttttattgattgtttggatcagagctcagttcctgtagaaaacgaactgtaaaagaccatgcaagaggcaaaataaaacttgaagtgaatgctaanaagnngaagggggntaanangaggaaaaaaanagtgggagggngatgaggaatgnggtgaa

SEQ ID NO: 190 - DNA, 1596 bp; single-stranded, linear
  immediate source library: LUNGNOT01
  immediate source clone: 060951
agtttgttatttgaatgtaatttacatagaggaatataataatggagagacttcaaatggaaagacagaacattacaagcctaatgtctccataattttataaantgaaatcttagtgtctaaatccttgtactgattactaaaattaacccactcctccccaacaaggtcttataaaccacagcactttgttccaagttcagagttttaaattgagagcattaaacatcaaagttataatatctaaaacaatttatttttcatcaataactgtcagaggtgatctttattttctaaatatttcaaacttgaaaacagagtaaaaaagtgatagaaaagttgccagtttggggttaaagcatttttaaagctgcatgttccttgtaatcaaagagatgtgtctgagatctaatagagtaagttacatttattttacaaagcaggataaaaatgtggctataatacacactacctcccttcactacagaaagaactaggtggtgtctactgctagggagattatatgaaggccaaaataatgacttcagcaagagtgactgaactcactctaaggcctttgactgcagaggcacctgttagggaaaatcagatgtctcatataataaggtgatgtcggaaacacgnaaaacaaaacggaaaaagatttctcagtatacacaactgaatgatgatacttacaatttttagcaggtagctttttaatgtttacagaaattttaatttttttctattttgaaatttgaggcttgtttacattgcttagataatttagaatttttaactaatgtcaaaactacagtgtcaaacattctaggttgtagttactttcagagtagatacagggttttagatcattacagtttaagttttctgaccaattaaaaaaacatagagaacaaaagcatatttgaccaagcaacaagcttataattaatttttattagttgattgattaatgatgtattgccttttgcccatatataccctgtgtatctatacttggaagtgtttaaggttgccattggttgaaaacataagtgtctctggccatcaaagtgatcttgtttacagcagtgcttttgtgaaacaattatttatttgctgaaagagctcttctgaactgtgtccttttaatttttgcttagaatagaatggaacaagtttaaatttcaaggaaatatgaaggcacttcctttttttctaagaaggaagttgctagatgattccttcatcacacttacttaaagtactgagaagagtatctgtaaataaaagggttccaaccttttaaaaaagaaggaaaaaactttttggtgctccagtgtagggctatctttttaaaaaatgtcaacaaagggaaaataaactatcagcttggatggtcacttgaatagaagatggttatacacagtgttattgttaaaatttttttaccttttggttggtttgcatcttttttccatattgttaattttatnccanaatgttaaatatttgtattacttgaattttgctcttgtatggcaaaataattagtgagtttaaaaaaaatctatagtttccaataaacaactg

SEQ ID NO: 191 - DNA, 1482 bp; single-stranded, linear
  immediate source library: PLACNOB01
  immediate source clone: 064994
cacgaacgcctttgtatgggcctaaaggccaaggtggtggtggagctgatcctgcagggccggncttgggcccaaagtcctgnaagccctgaatcaccactttccagaatctggacctatagtgcgggatcccaaggctacaaagcaggatctgaggaagattttggaggcacaggaaactttttaccagcaggtgaagcagctgtcagaggctcctgtggatttggcctcgaagctgcaggaacttgaacaagagtatggggaaccctttctggctgccatggaaaagctgctttttgagtacttgtgtcagctggagaaagcactgcctacaccgcaggcacagcagcttcaggatgtgctgagttggatgcagcctggagtctctatcacctcttctcttgcctggagacaatatggtgtggacatggggtggctgcttccagagtgctctgttactgactcagtgaacctggctgagcccatggaacagaatcctcctcagcaacaaagactagcactccacaatcccctgccaaaagccaagcctggcacacatcttcctcagggaccatcttcaaggacgcacccagaacctctagctggccgacacttcaatctggcccctctaggccgacgaagagttcagtcccaatgggcctccactaggggaggccataaggagcgccccacagtcatgctgtttccctttaggaatctcggctcaccaacccaggtcatatctaagcctgagagcaaggaagaacatgcgatatacacagcagacctagccatgggcacaagagcagcctccactgggaagtctaagagtccatgccagaccctggggggaagggctctgaaggagaacccagttgacttgcctgccacagagcaaaaggagaattgcttggattgctacatggaccccctgagactatcattattacctcctagggccaggaagccagtgtgtcctccgtctctgtgcagctccgtcattaccataggggacttggttttagactctgatgaggaagaaaatggccagggggaaggaaaggtgagtgggaaggagcagaaagctgggaaaggggatgggtagaacaagactgagaaatccacatgcttcagaattcagagggttcagggaatggtttcggatagtaggctctccctgctcccttctctacaggaatctctggaaaactatcagaagacaaagtttgacaccttgatacccactctctgtgaatacctacccccttctggccacggtgccatacctgtttcttcctgtgactgtagagacagttctagacctttgtgatagaactaaaatgctctctgtactctagtctcctgcctcctcagctctgcaagtagtttagtaggaatgaagtggaagtccaggcttggattgcctaactacactgctaaaaatatttgtaatccttaataattaaactttggatttgttaa

SEQ ID NO: 192 - DNA, 1873 bp; single-stranded, linear
  immediate source library: PLACNOB01
  immediate source clone: 071177
tttctgatggagagagtccaggagggatggaaaactcctggatttaagctcagcatcccccacatgggcttttcgatcatcttcaggcctgaagctgcacgacctgaagttcgcctgcatttatcagccctctttgtgctgctccttgccaccttggggttcctgctggggaccatgtgtggttgtggcatgtgtgagcagaagggaggatgaggaaaaagagaagaaaccccggtactgacaagctgtttttgagtgccactgtttgccatcatctaagccactgaatcaagtgtatttcaggcttatttcaacattccaatgccctggttttcctgcttgaatctgttcgtggtcaaaggtttgggggaatttgtgaccctggaacatccccagagtgaaagatggagctgggccacatcagaataaggccttggccccatcctctcacagcctaggtgctctgcaggcatgctgactgtcctgattgcgatccagcccgaaattccctcctctgctttcaaaagtcaaatcccccattcttaggccacactggtgtcacaagctcctgtcagggagctggggtttgggaatgtgctttgtggaactctgctttaaagtgaggggccgaggaaaacttagaaacaggcagagttggaagcagccaaatcacagtgggtgttgtgtntgtgtggcgtgtgtacatgcgtgcgtgtatgcgtgtgtgaaagcaggtggaccattccactttttagctcctattgatgcaccaaaccaagtgcctcatttctgtgccaaatgtttgccttggtcgttgtggacctccttctctaacttgcggtggcatgactgtcaggaggtgctggcattttcagcagatcctcatgtgttgaccctgatgtctttagcagaggcctctagcatctcggtttttcatccactgcaggaatgtggccacagggagcagaggtttgtactttccccaagaggtcctcatcctgagacggtctctacccatgtttaacccaaagagtgcaggccaggttccttatccttctgatgaaggatgagagagctcatttagaagtcagagcaaactagggtctcagtattgagaaacgcagcctgccagggaatcacagagacatcggggtgcccgcgatggccctcatgaagccatgcctcgacggcattcaggaagccctgcaaacgtgctttttgaactcattggccaggtgtgatttttacacaaggtaaacgtggtcaagggcatcggggaatttgctccaagcagatagctccctctgaggaaccaaaggaagcaagtttccacgatttctgaagagctggtataggaagtttctttcttccttttgtgttacatgtgcattaaacagaacaagctgtgtgtcatcacagattgtactgtgggctcagaaaccgtgagagaggcccccaccgtggacaccggctctagggccacaggaaaaggaacgtttccaggcattttgtctccagggctcccgctggacaggcacgtactgccctggggagtaaatgcggagagttcacgaactgtgcccaacgcatgttatagccagggtcctactaactactcagtaaaagaacgtattgttgtattcctccagtgttaagctatagccatgttaaaagtcactgtggcatttattctcagcatcaaataccttgtaacgtcttctctgccttgttagtgcatatttttacttttctgatactgtaaagaatatatccagtatgtaaatgaatgttctataaatcttttgtatagtcattttctcgtgctccttaaatatcatctctattcagagtataataaaattatgaacttggt

SEQ ID NO: 193 - DNA, 325 bp; single-stranded, linear
  immediate source library: THP1PEB01
  immediate source clone: 073159
atttggaaaaatttagaaaccctcattatagttctctttgtcctgtaagaaggagcttctattcacctcagggtcaattgctttccctaatagcttgttttgtaagtaagttatgagattttggtttnctttttgcttgggtagtggggagaatttcattgaggaatcacccaagaaatctgtatttcattgatttggatcattaccttactagcctcttccctgtgaacgctttgctttggcctgatcatcctcaggcctcaggtccaatgtgatatgncctttgtatgagnccgggcaagctaaccctacangccttaccctt

SEQ ID NO: 194 - DNA, 1605 bp; single-stranded, linear
  immediate source library: THP1PEB01
  immediate source clone: 073293
ggtggggggagggtggtgagggcaaaggatttgtttttcaaattatgtgtttctcaggttaacaaagttattttagattctctgccatgccagcaggtgttagagagagcctgaagtgttacatatggcagaaaataaatgtctctgattactttgctacctttaaaaaaatctatatgtgtttgcaaaacagcctagggggatctaccacctacacagcatgaattattcataagtcataggtgcacatgtatgagcaagttatttttgagaaagaaactgcctataatataataaacctgtcaggtctttgggtattgtttaatttgtgtgttgttgctgttttatctggactgcatcttggggggtactgggctctgcttctggtttttagtttgcctttgaatttactgagctactagaaagacaaaaaaaagctatttttatggtaatagaatacagaatgacttaggtgtaaaagtacacgtgaagaccatcgtagaatatacagctttggagttttcttaagacacagtccttcctactgaaaaggcttgctcacctttggagaggattgtttatattttcagcctgggttcctttatgcagtcccaacttagaggggagcttcggtttatttacactttgctttgcacgataacttgtatgcgaagacctctttatatctttcagtaggtcagagggctctttgtcctggttgaagtcccaaagtgtcagtgcagctgagaatgtttctcagcctccccctttacagaggaagggtcctggattttcataaatccagaccatgcctgcttcctataaatccatgtatatgacattgtactgtatctgatttctgtgccagtcatctgacctgattctttaaaccccataaaggtactggctatatgtagtagtagtatcctaggtaaatatggtgattaaaatacttctcttctaaattataaagataatgagttttgcattttattaaagggtcctgttattagtgacacaggatttttttttttaatgcttcatacatatagttcttatctaaacttgttcagctaacttcatagatcagttacttagcaaattcatactgagtcttattttgggaagtcttcctgagggaagctgtacaaaactgaggtggtcaggttcatctcttcaaagtaccagttatacagccatctaaataggcataacttatggcaaaattataacaattttttttctttgcagtaaacgatacctcatctaagaggctctaatacctaaagagtttatccttaaaagtaaaagtgactttgtaccataaaataaccccaaagccactctctagggtttttattttcttctttctttgtctttatcttttctaacttagttttggaattacgttagctactttggttccatagaacaagttttcaacttggggtctacagttcctacagtgtgctcattgtctcagtgaagttcttttgttttcaaagattcatggtaacaaaatgtattttactgctacaactaaaaggaattttaattaaaaaggcatttaataataattncatttaagtggaggcagtaaattcc

SEQ ID NO: 195 - DNA, 1049 bp; single-stranded, linear
  immediate source library: THP1PEB01
  immediate source clone: 073345
ggcaggtgctgcaggagccctttgctggctttatctgctcccttgttctggacacagagccctgggaaaaagaggggtggagcagcaggaggtggatgttctgttttggcacagaatgggtgggtgggaaangagggccctctttatacantgttntcggcactcctccccagtcantcctcttttgcctgtttgcagcatgcacccatctggnaagtaactcatgatgggacaagactgaccaagcctgccatntccaaaggggttagcaatnctttttncnnggcccccacattcaggggcatgcatagaaaaggaaacccaagagctgcctggacacacggaaacccaactgagaacaaaatcctggcccgtgcttggtcaaagcaaacccatttcactgtcaggacccccggtcacacaggaaccacccgccaggggagcctgtgactgtcagttcctgtcccaggctttgcccggcacgccccaggaacccaaccctctgggctgacctttctcctgcttctctccaggctctgcaggggacagggcaggtgctgcaggagcccctttgctggctttatctgctcccttgttctggacacagagccctgggaaaaagagggggtggaagacagacaaggaaggtggaatgttctgttttggccaccaggaaatggggtggggtgggcatacacagagaggacccctctcttaatacagctgcttttctcggtgccaacctccctcccccaagctcagatcctcctcttatgcccttgattgtgccagcccatgccacccccatcctgggcacagttacaccctcccatgcagtgggagaaacacagaccctcgtacccaaaggcccctgccccacttctcccccacaaagcggggtctcaagccacactgccctgtttgctgccatgaggccccccccccccagcaatatcccaggggcgggcccaatgcccactgtacatgaggctgcatgatgggtctggggccttgctgattccccagacccctaattaaatgtttcttgt

SEQ ID NO: 196 - DNA, 350 bp; single-stranded, linear
  immediate source library: THP1PEB01
  immediate source clone: 073347
gttagacctgtgtgtttttaaagaatcatatgttaacaaatacccatgcaaagagcttcaaaaagtgaaaccgtgttaaaggaacacaattttcctcactcagacatatttgtttattgaattgcaaagttttattttaaatcagcatttccccaaagaatatatcatatgacgctagttccaaggggcttgactgagtggtgttttgctggggggagacaggggtttgttaatacactttactaaatactgagctgaaaaatgttaaatagatttcacgattgcctccttgaagattttaaagttcattgtggttcttcaaggcgaaatccggtgaaccattcctcaca

SEQ ID NO: 197 - DNA, 750 bp; single-stranded, linear
  immediate source library: THP1PEB01
  immediate source clone: 073582
gtcggatatgttgcggtcactatctaacacaaaacctacagtcaatgaacatgacttgttgaaattaaagaagtttacagaagattttggtcaagaaggctaagccaaagacaaggaagatgcttaccatatgtattctttctttcatagatatttttgtctatttggatcgcattaattgtttccagtaaaactcttttaccacagggaaatacacatctcacttcagagttccattaggttttatattgtacttttcctccattacttattaaatactcctattaacaaaaggtacaaaataacaggttatgaggaaatgagcgatatatgaacggcataaaaacagaaattacccagtaaaaaggatgtcagaaattgacatacaaatatttacaatttttatgaatggtggtctttgcaaagagcatttatattttcttttttttttactaaaatgatatagggtttattttatattttcaaaaaaattgttaaacatcattcttatcaatgtaaaatttacgttattaaaaaattacaaatgatagaatctttactcagggatgggcaataaaacagcaaagagctttgtgattgggtttgaaagattttgaattatagacagtgctcttaatagtttttaataagttgatatttttttctgtgtagatttaaataatttctttaaaagcgtaannttggctggncatggtggcttactgcctggaatcccagcactcngggagg

SEQ ID NO: 198 - DNA, 888 bp; single-stranded, linear
  immediate source library: THP1PEB01
  immediate source clone: 073735
gtctggacatgtttgagcacatcagcctcatgaccttggacagtctacagaaatgcatcttcagctttgacagccattgtcaggagaggcccagtgaatatattgccaccatcttggagctcagtgcccttgtagagaaaagaagccagcatatcctccagcacatggactttctgtattacctctcccatgacgggcggcgcttccacagggcctgccgcctggtgcatgacttcacagacgctgtcatccgggagcggcgtcgcaccctccccactcagggtattgatgattttttcaaagacaaagccaagtccaagactttggatttcattgatgtgcttctgctgagcaaggatgaagatgggaaggcattgtcagatgaggatataagagcagaggctgacaccttcatgtttggaggccatgacaccacggccagtggcctctcctgggtcctgtacaaccttgcgaggcacccagaataccaggagcgctgccgacaggaggtgcaagagcttctgaaggaccgcgatcctaaagagattgaatggtctacgaccccttccgntttgacccagagaacagcaaggggaggtcacctctggcttttattcctttctccgcagggcccaggaactgcatcgggcaggcgttcgccatggcggagatgaaagtggtcctggcgttgatgctgctgcacttccggttcctgccagaccacactgagccccgcaggaagctggaattgatcatgcgcgccgagggcgggctttggctgcgggtggagcccctgaatgtaggcttgcagtgactttctgacccatccacctgtttttttgcagattgtcatgaataaaacggtgctgtcaccaaaaaaaaaanaaa

SEQ ID NO: 199 - DNA, 1119 bp; single-stranded, linear
  immediate source library: THP1PEB01
  immediate source clone: 074398
aattttttgttatttctaagcaaacctcttttgtacttttcttacttctaatatccatccctggactttttgtattccaaatgtttgtgatgctgagaagtgaagttcattttatgtgatcttcatgcgtcgtaatctacttttggtagataattaagaattattaaaccctcatttaaatgtgacataaaatacagctttaagcacataaatacaaagcagcttccatcaggaacatggagcaggcagggactccattttacagaattactgagatttctcagttgtaaaacatgatgtcatcctgcatgcctcctggaattctccaatggggtcgccaaacaacaaatggagaaaaaaagttttacttccttgcattcttctacctttaaatagcaaagtnnnnnnnnnnnnnnnnnnnnttgcccccttccctcttttcttaaacttctggcatttcagagctcagcaggctacccctggtttctggagagttgggctaggcctgaagctccccctcccccacctctgctaggcagcccaggcctggtctgggagacagcccctcaccctgcctgggctcttggccaagcggccttggatggatgaagtcagagaggtggggtgagggtgagcttactcagggcccccagaggaagccctcagcctctgccctccccccacacagggcgggagcccaggcctgttcctggcagctgtggctgcagctgtgctcctgctccctcctggaatgtgcgacaagcccaaatgttccagggaggcggccggggcagggggcttagaagtgctaatatggttctgtgttttgcctgaaacgataccaggttcccctgaatagcaactttacaaggtccatgtgggagggaccaacccagatgccctgctgagtgtccctgaaaaccatggcagctccatctgtcaagatggcaggggccggagtgagggggctgctggcttaacagcaggcatctgggcaggccagtcctcaaagcagctcctgaaggtctgtgttgcactgtcaccagtctcaagctatgcctctaatttcaccagggatattgactaagaagacaataaaatctttttctttgtgtaaaa

SEQ ID NO: 200 - DNA, 2358 bp; single-stranded, linear
  immediate source library: THP1PEB01
  immediate source clone: 074431
gcaagatggctgccctgacagcggagcattttgcagcactccagagcctgctcaaggcctcctcgaaagatgttgtcagacagctgtgtcaagaaagcttttccagttcagcccttggcttgaaaaaactcttggatgttacatgttccagcttgtctgtgacccaggaggaggcagaggaactgctccaggctctgcaccgcctcactaggctggtggcattccgtgacctgtcctctgccgaggcaattctggctctctttccagaaaatttccaccaaaacctcaaaaacctgctgacaaagatcatcctagaacatgtgtctacttggagaaccgaagcccaggcaaatcagatctctctgccacgcctggtcgatctggactggagagtggatatcaaaacctcctcagacagcatcagccgcatggccgtaccccacctgcctgctccagatgaagatccaagaagatcccagcctatgcggagacaaaccctccatctcagctgtcaccgtgggagctgagcaaagaaacactggacaccatgttagatggcctgggccgcatccgagaccaactctctgccgtggccagtaaatgatccagccagctgccagggccactgccatgacccagctgctcatgagtgataaatgtctccccatatgcaggctgcccttgcagctgcagctgacaacaggcaggatggtggggacagcagggggctactgccatccagaagttacagttggattgggaagaagcagccagatcccccgctgttctcactcatcttctttctctttctgaagctggagagcagaagcccccatctttgaaaagctcctgagtgcaacttaattaccaccatggcagggtgagggaacatttgcatcgtcagctgcctctgcatagctgtttgagaaattcaggcccaaatcatgcagcctatccaataagtaagtttatttccaacattagctctaattagttcatttccaatcccagaacacatggagggaatcggacaggtgatgccagcagttcctgctcctctgtcagggaagccaggcagagcccacagagcattgttccatccagagtgttccctgagccccctccaccatactggaacccctcttcagtgtagggaagtctgaaatgggtgctaattcccttcttcatgaaaccagggccctcttccttcatctaatgcagccactcctaggtgaagaagtgggaataattggaaataaacaacagttctaaaacttccatgatttttgtagcttcttttgtccccaagttgaagcttttggccagtaccttctctagtttttaaagatgatcccaacttcctaattcccagctaagcccttgacccatggtgtgacatgaaatcaggcaattgaatcgnaccactttctgctgattgtggatgagtcctgccggcggtgaccatcttccaacatagggatatacctccctccttcttataactgaagatcctggagcccggaagattcagggcagacagaccctgataatgagcctggcagggaagggcaaccaacatcttgtaacttgctttccccaccctgtttctgggggcagagccaattgcccaatttctaccctaatccaaagtccctggtgtgggtggggttaaacgtgctggtgcatcctaggtcatccaagagtgaagcgccaagtcctgagaaggggcacaggaactccctggagggtggagatggagcacctgccccccatggcagggtacactctccccacagccttcctccccaccatcccgtggggactctcgggatttaagcactcgtctctctgggaggcccagaccccactccatttataggcacatctccttcatttcctaggtcactgcccctttgtttacagctcctgcctcctcccttgaccacagcctggtttacaaattccatcagctcccagccccacctgccaaagtcccaggtttacaagccacggttaacttgctgtgtctgcgtggaattctctcctctgtcccctccagtctcctcattggagtgacctgaaggtgtggcttcctccactttttctcagtattactttgccttagttttccccaagagggaaggctgggaactcttaactctgtaccccttgatagttatttaattctgtttctcctagtggttcacaattgaactgaattgagatggtgtcgggtggctaaggagacacctcacctctccttccccattgtgccgcctttatcaattgcctgttttgttttgtttgttttttaactttccataataaaatggagttctcttcaaaaaaanaaaaggg

SEQ ID NO: 201 - DNA, 1775 bp; single-stranded, linear
  immediate source library: THP1PEB01
  immediate source clone: 074449
gtagaacaggacagaaaccgcgatcaacaacctcaaccccgccttctccaagaagttcgtgcttgantaccacttcgaggaggtacagaagctcaagttcgcgctctttgaccaggacaagtccagtatgcggctggacgagcatgacttcctgggccagttctcctgcagcctgggcacgatcgtctccagcaagaagatcactaggcctctgctgctgctgaatgacaagcctgcggggaagggcttgattacgatcgctgcccaggagctgtccgacaaccgcgtcatcacactaagcctggcgggcaggaggctggacaagaaggactctttgggaagtcagacccctttctggagttttataagccaggagacgatggcaagtggatgctggtccacaggactgaggtgatcaagtacacactggaccctgtgtggaagccattcacagtgcccttggtgtccctgtgtgatggggacatggagaagcccatccaggtcatgtgctacgactatgacaatgacgggggccatgattcatcggcgagttccagacctcagtgtcacagatgtgtgaggctcgagacagcgtcccgctggagttcgagtgcatcaaccccaagaagcagaggangaggaggactttaaaaactcgggcatcatcatcctgcgatcctgcaagataaaccgagactactccttccttgactacatcctgggaggctgccagctcatgttcaccgttggaatagactttacagcctccaacgggaatctcctcgacccttcctctttgcactatatcaaccctatgggcaccaacgaatatctgtcggccatctgggctgttgggcagatcattcaggactacgacagtgataagaatgtttccagctctgggattcggggcccagttacccccagactggaaggtctcccatgagtttgccatcaacttcaaccccaccaaccccttctgctcaggtgtggatggtattgcccaggcgtactcagcttgcctgccccacatccgcttctacggtcctaccaatttctcccccatcgtcaaccacgtggcccggtttgcggcccaggccacacaacagcggacggccacgcagtacttcatcctcctcatcatcacggacggggtcatcagtgacatggaggagacacggcatgccgtggttgcaggcttccaagctgcccatgtccatcatcatcgtggggcgtgggcaatgcggacttcgctgccatggagttcctggatggggacagccgcatgctgcgctcccacacgggggaggaggcagcccgcgatattgtgcagttcgttccctttcgagagttccgcaacgcagcaaaagagaccttggccaaagctgtgctggcggagctggccccaacaagttgtgcagtatttcaagcataaaaacctgccccccaccaactcggagcccgcctgagctccagtgcccagcagcagcatgtcagctgagcctcctgccctcccccaggaacatgcacgctcactctgcttccttgtgggtggcctttttttaccgatccccttttttattttttacaaccggacctccacccccaacttcctccagcccagctgggcttcctttgttggagtcaactgttgatgcttccaggccaaactggcttcctctcctcctcnccccacctttgccattcttaagtattgaatgtactttgtataattttagtggaattgttattgagaataaaatttttacaatcat

SEQ ID NO: 202 - DNA, 1550 bp; single-stranded, linear
  immediate source library: THP1PEB01
  immediate source clone: 074452
aaaaacattttaaatcccttgtctgggggtcagtcctctaaacatccctcagatttcagatagtactttcaaccctgtcctaacatagcaggtttgcagtaatcttttagaatatagcttgtcaaattagagaatggttttaccccacatgttctcataggagacattattatttagaaccctaaggtagacatgtttaaaatcaaagtcctaagaaacagaactttggaaaaatggaggaaatgtttttaaagtctgtaagtttgcacaatactgtatagtaactaaatgcatgctacttccgttgtatcctagttattttagaaacagaggtggcctaatttggtggccaaagtaactggtttactttgagtgtaccagcttatggtgccattgatgaggaattaaagtaggtcaaaatttaattggagttggtattacttcgtaaagctagttttcaagaggaagaaaaccacacttactaatgtttgaaattgctgacctggaacggttgtgagaagactcctggcttctttcttgcctcacttaacaaatattttaaggtcaaagcaatatctgtgcacggctttccttttgctcctccagacaagtgaggctgttggtatagtcctcttcaccctctgcatgtagcttcaccctagatcagacttttgtctcttgggtcccagatggcacaggagcactgcatgcttgttttctagagcccagccagtcatgggtgctagcctagtctccacacaccagcaagtagaacccaagtgtattgtataaatatttcctgagtaccagtaagagaatgcattcttttctcatctaggccaggaatgttgaaaatgctcagccttacatagaaactcctagattttcactaacgcatttcacaaaagtaaataagtatttcatataattcagaggatgtttaaattgtcagcattttaataaatacttgcattataattttgtctcttttttaaagaaagtcatacttgaatataatttattaaacgttcaatggagtatatagtctcttcatatataattaagcctcatgttatcttttttttaaatcaaccttttgaacttcaactacagtctaaaagtcttgatggtaactatagtgtaattatctttttgtctcactggattttatagttagtggaaaatgcctttacaaaatgtatttaaaatagctgtcatctcatttgtaaattttgtcgtgtattgtgatatagtgaaccttattgtccttatgaaatggtagctttgtgaaatacattcaccaaaaatcaaaatttgaacatctttatgattccttaccagctgaagccagatagacaggtattaattgagctgatgccccacttgagtttatagactgtttgataactgcctgtcctccaaattgtgtatgtatatgttacgatggtttaattcttgagtcagggccagcacgcatttatattttctaccaattaccttgatagaaataatcttaggaaattgctgacctgggacgngttgtaatgaag

SEQ ID NO: 203 - DNA, 2571 bp; single-stranded, linear
  immediate source library: THP1PEB01
  immediate source clone: 075091
cggctcgagggccgaaggatgcccgtttgtgtctaaacggaggctcggccacaacgccactggattggtggtagggcggggcgggccacagtctccagcctgaagcggaagtggaggaaagatggaggaccatcagcacgtgcccatcgacatccagaccagcaagctgcttcgattggctggtggacagaaggcactgcagcctgaaatggcagagtctggtgctgacgatccgcgagaagatcaatgctgccatccaggacatgccagagagcgaagagatcgcccagctgctgtctgggtcctacattcactactttcactgcctaagaatcctggaccttctcaaaggcacagaggcctccacgaagaatatttttggccgatactcttcacagcggatgaagggttggcaggagattatagctctgtatgagaaggacaacacctacttagtggaactctctagcctcctggttcggaatgtcaactatgagatcccctcactgaagaagcagattgccaagtgccagcagctgcagcaagaatacagccgcaaggaggaggagtgccaggcaggggctgccgagatgcgggagcagttctaccactcctgcaagcagtatggcatcacgggcgaaaatgtccgaggagaactgctggccctggtgaaggacctgccgagtcagctggctgagattggggcagcggctcagcagtccctgggggaagccattgacgtgtaccaggcgtctgtggggtttgtgtgtgagagccccacagagcaggtgttgccaatgctgcggttcgtgcagaagcggggaaactcaacggtgtacgagtggaggacagggacagagccctctgtggtggaacgaccccacctcgaggagcttcctgagcaggtggcagaagatgcgattgactggggcgactttggggtagaggcagtgtctnaggggactnactctngcatcttttccgagactgtgcaagcagtatggcatcacgggcgaaaatgtccgaggagaactgctggccctggtgaaggacctgccgagtcagctggctgagattggggcagcggctcagcagtccctgggggaagccattgacgtgtaccaggcgtctgtggggtttgtgtgtgagaggtagagaggcctcagcttctcctggtgggggtgctttgcctgtgttccccagctcatgacccttctccagttgtcttgttcccatataacatttgaactctttacacacctgaacctgtgggggccttgcccatttgaccatgtggcccaggccaaagcccagtgttggccttacgcatggtcggcaggagagtcagttgtgtgctctgttgaagccccacagagcaggtgttgccaatgctgcggttcgtgcagaagcggggaaactcaacggtgtacgagtggaggacagggacagagccctctgtggtggaacgaccccacctcgaggagcttcctgagcaggtggcagaagatgcgattgactggggcgactttggggtagaggcagtgtctgaggggactgactctggcatctctgccgaggctgctggaatcgactggggcatcttcccggaatcagattcaaagggatcctgggaggtgatgggatagactggggagacgatgctgttgctttgcagatcacagtgctggaagcaggaacccaggctccagaaggtgttgccaggggcccagatgccctggacactgcttgaatacactgagacccggaatcagttccttgatgagctcatggagcttgagatcttcttagcccagagagcagtggagttgagtgaggaggcagatgtcctgtctgtgagccagttccagctggctccagccatcctgcagggccagaccaaagagaagatggttaccatggtgtcagtgctggaggatctgattggcaagcttaccagttttcagctgcaacacctgtttatgatcctggcctcaccaaggtatgtggaccgagtgactgaattcctccagcaaaagctgaagcagtcccagctgctggctttgaagaaagagctgatggtgcagaagcagcaggaggcacttgaggagcaggcggctctggagcctaagctggacctgctactggagaagaccaaggagctgcagaagctgattgaagctgacatctccaagaggtacagcgggcgccctgtgaacctgatgggaacctctctgtgaacaccctccgtgttcttgcctgcccatcttctccgcttttgggatgaagatgatagccagggctgttgttttggggcccttcaagggcaaaaaaccaggctgactggaagatggaaagccacaggaaggaagcggcacctgatggtgatcttggcactctccatgttctctacaagaagctgtggtgattggccctgtggtctatcaggcgaaaaccacagattctccttctagttagtatagcggacttaataaaagaggaaaaaactcttgcttcagtactgacagttccttatgctgcttctctgagcctgcagttgaggcttcgcacctg

SEQ ID NO: 204 - DNA, 498 bp; single-stranded, linear
  immediate source library: THP1PEB01
  immediate source clone: 075169
ccttggcatgatcaagatggatgttgttgatggcaaaactcccatgtctgcagagatgagagaggagcaggggaaccagacggcagagctccaaggtatgaacatagacagtgaaactaaagcaaataatggagagaagaatgcccgacagagacttctggattcttcttgctgatgatttttttccttgagctgtaaatctgtgacttctgcgacatgggatttaatttggctaaagcacccctgttggtttcacagctggtttgcaataaatggttctttggtggagatactgagcatgtcttattgagtccctaatggaaatggtgatcaacaaaaggttatggaagaatggtttatgaacttcccataggaagcacctgagagatagtaaactgcagcaagtaactatgtgtaagtcctcatcaaatgaaaagcagaaagacaagaacaattagtcaagagcagtagccctgtcagagcctcggggcatacctt

SEQ ID NO: 205 - DNA, 276 bp; single-stranded, linear
  immediate source library: SYNORAB01
  immediate source clone: 078090
catcagcccatgagacaccaaaaaaagtctgagttttcttactgatgtgtgtgccagtaattgatatggccaagtcaggaaacacagttactgaatacagttactgtcttcagcatggtgtatgtgtcacatttctgaggtgaggtaaaaataattgggtgtgtatgatacactgtcatgagcatgtgagggaataatgcatttaaattgaaaaagttttcttagctaagtgtcacactgatgtncttcagaaaattcaantgtggccttttnaaa

SEQ ID NO: 206 - DNA, 261 bp; single-stranded, linear
  immediate source library: SYNORAB01
  immediate source clone: 078610
cagaggctcctcccaccttaatctcaatactgctatgtagtactggtgaacaactttggagaacctagatttattttaatattctaatagataattaaattttaaaatgatagaagcctggtttttgagtaatttaatcatctttcatatcttgatatgcagctgcatcagatggaaaaaaatttactaaagcaccctgttaaagagctggtgtgctccagtgaggccctctccttttntcagcacagtgtggcagtggta

SEQ ID NO: 207 - DNA, 253 bp; single-stranded, linear
  immediate source library: SYNORAB01
  immediate source clone: 078771
ctaaattccttttaaaatattgctcttgatttcatagagaacttagagttgtgatcttttgccagcgttccattgcattgacgttatctccaatgtacataaacacataggcctttnaagataatnttctggtgcgctgaaattttccctcaagtggaggagggaagtaggagtgttttggngataatgtcgatagangagaaagaacattgttttatagttcnttnggcagttntcttnaanaaaaaaagcc

SEQ ID NO: 208 - DNA, 463 bp; single-stranded, linear
  immediate source library: SYNORAB01
  immediate source clone: 078822
gctgctattgatctgccatgatttctatttattcttttatggcatgtaatggtgtttagtaatattttaatgtagattttgatttatttcagcaatagtaattttaagatattctttgaatgaaagtgtcttcgtttctatgatacaggtcattttgtagtatttaaccaattaagatgcactgcttacttttctgagcactatttaatgatggggtaaaaacccaattggctcaaccagctagcataaggattagctgtgaataatgctgacagatatgatggttccttaggaacaatcatttaagctttaatggtaactcaatcataagtccatagattatttttttctagctaaaattttagaaaattacttgtgaattacatacttgttttagtttggtcttagtttttagcataaagaatgattggcttttgttgatctaaacatgcttcctggacag

SEQ ID NO: 209 - DNA, 707 bp; single-stranded, linear
  immediate source library: SYNORAB01
  immediate source clone: 079378
ctcgagacaagcccgtatgtgtcaacacctatggaagctacaggtgccggaccaacaagaagtgcagtcggggctacgagcccaacgaggatggcacagcctgcgtggggactctcggccagtcaccgggcccccggcccaccacccncaccggtgctnnnnnnnnnnnnnnnnnnnnnnncgtgctggagctgcantntnnaanggtcctcgtagatggagatctcaatctgggttcggtggttaaggagagctgcgagcccagctgctgagcaggggtgggacatgaaccagcggatggagtccagcaggggagtgggaaagtgggcttgtgctgctgcctagacagtagggatgtaaaggcctgggagctagaccctccccaagcccatccatgcacattacttagctaacaattagggagactcgtaaggccaggccctgtgctgggcacatagctgtgatcacagcagacagggtcgctgccctgatggcgcttacattccagtgggtctaatgaccatatcttaggacacagatgtgcccagggaggtggtgtcactgcacaggaagtatgaggactttagtgtcctgagttcaaatcctgattcaggaactcacaaagctatgtgaccttacaccagtcacttaacttgttagccatccattatcgcatctgcaaaatggggattaagaatagaatcttg

SEQ ID NO: 210 - DNA, 338 bp; single-stranded, linear
  immediate source library: SYNORAB01
  immediate source clone: 079479
ccaaaatggcgaggggctgtattgaagtgggctgtgtttgaggccggtgtaagaacgctcattctacccccaacccttgtctccaaggacctcggtttgtgcgtgcatatgtgccgggtacccggtggggcgggtgcccagtaagtgctcggactcgcaggggaagtcgcccacggggacggattggttgttttttcctgtatgaagcggttggcaccactgaagtgaccgaatgaaagacctctacaggggcaggtaatttcactggtccacaagcgggtcttcctttaacggtcgaaaccaaaaangaccccaaacaatncctttgaccnaagttt

SEQ ID NO: 211 - DNA, 276 bp; single-stranded, linear
  immediate source library: SYNORAB01
  immediate source clone: 079895
gtggttcccactgagttctgtgacaagcattctacatttatagatattaaatctttggcccgggtcatttacctgggctggaatagggctctcggctgatcctccttcctaaacaccctctcaatgggagaggctgatacccaacatgcaaaccttgtttttaacttctccaggcaaagggatgttggaagacattctggagggggtagggtgtgaagatttacaaataatctttgaatatctncttcatgataggtcttggaggtgccttgtggg

SEQ ID NO: 212 - DNA, 251 bp; single-stranded, linear
  immediate source library: SYNORAB01
  immediate source clone: 080226
ctagtctcgagtaaagattatatttatctgatataaaattattaagatataaaatagtataccatggaaagtgtcccttctcgctctgtcccccagatactctgtttccctccccagaggcaaccatgattaactgtttctggcataactcccaagatactggatgcatgtaaaagcaaatgcttattttttcctgtttttctacacaaaaggttgtccattagttgtcactttttaaaacaaaaaagttt

SEQ ID NO: 213 - DNA, 354 bp; single-stranded, linear
  immediate source library: SYNORAB01
  immediate source clone: 080231
gctaaataatttcatgaaccagtgtggggactgggaagaaaagcactttgagcaaggactcttgggttcgagcaaaggcaattagttgacatgatacttcttaagttcctcagtatgtatatgttacaatcgtttatcagacatcttaatagaatcctaattgaaaaaccagttgccaaaattgcacaagttctgctcgctgatactagctttctccccttaactctaaaataccagggatgcttaaggacgtttgtaatagtttttttaatgctttgtttcacttttttaaaaaagaatctttgaagggaaggaagagcagaaagaagtattttaagaaaaatggagagaagt

SEQ ID NO: 214 - DNA, 254 bp; single-stranded, linear
  immediate source library: SYNORAB01
  immediate source clone: 080369
cactccagttcccccaactcctggcggagatgagataataccggacgatccggatgatacgcctacacctcccaaaccggtttcgtttaataatgacgttattctcgataaaacagaaaaaacgttaactattcgcgattcagtttttacttataccgagaatgctgacgggactatatctctgcaagatagcaatggtcgtaaggcaaccgnttaatctttggcagattgatgaagcgaataacactgttgcc

SEQ ID NO: 215 - DNA, 1005 bp; single-stranded, linear
  immediate source library: SYNORAB01
  immediate source clone: 080752
gggctgtgttcattgacttccttatcttgatatgaattctaagcatggatgctttggagtagattgaagtaaaatcagcaagtgttgtgctaactctaaatccactccaaagatcactttttgtagctagcttttaggtcagagactctgtatcttctttaggattattcagacaggacttatgtatctctggatttggtgatcagactctatattgacagtaggatctcaaaccctgcatccatccttcctccagcaagccctgctagccacatgaggaacaagtttccgtgtcttctgccttcctcttggggaaaggtgccttgttgtgatgaattaactcactgttagggcagggtggagaatggtactccttccttctcctgtccactgtgggggaagcttggcaggtatattatatttcatcatttaggaggctggcatgaccaggacttatgggtgggaggggagcatttttagtgaagcaagaaaggagtttgccaagaagtgatctgttttaaaggtcatatttggagaaagggcaaggaattgggtctgctttatttttgggggtattttgtttttgttcgcagagtacagaagggtgaagaagtgagcagaggcttatgaagatattcagatactcttctatgccaggaagcacaaagactttgttgagatttgcctcagttcagtagatcttccttggcagccagccataggttgtttctttgtcttccgggtcctaaagagcacagagaaaatggaggtccccagtctaggtaggaagctgattggatgaggacttctttttttccgacagcaggatggggctcttgggctccacacaccagatgctttggttttctacaactgttgctatgtgtagagggtgctcagagcgtggcatgagagcaaggagaccatggctactctttgaaatggatggggaaaattagcttaaaaatttaatcacgagattncgccactgcactccagcctgga

SEQ ID NO: 216 - DNA, 359 bp; single-stranded, linear
  immediate source library: SYNORAB01
  immediate source clone: 081040
ttgacaccctgttgaattcctgatgaaactggtaattttctttcttgcttttttttttcttttttttgctgttccccccttccttccccctgaaatgggtaattttctaggaaaatataatttgccaaaggaactcaagaaataaaaatcctatgtagactagtgttaaaatgtgattaggccaggggttttgtggacaatttaattcatgttgatgaagcagatgattgcagtagtccctccttatttatgggggntataccnagaccncggatgccagtggntccctgaaatcatgggtaatactgtaccccnatattgtncttgtntttntccngttttacattccttccatatgt

SEQ ID NO: 217 - DNA, 297 bp; single-stranded, linear
  immediate source library: SYNORAB01
  immediate source clone: 081583
ggcctgacgactccctggagcctttctttgactctctggtaaagcagacccacgttcccaacctcttctccctgcagctttgtggtgctggcttccccctcaaccagtctgaagtgctggcctctgtcggagggagcatgatcattggaggtatcgaccactcgctgtacacaggcagtctctggtatacacccatccggcgggagtggtattatgaggtcatcattgtgcgggtggagatcaatggacaggtncngnaaatggactncaagggaggacaaactnatgncaaagagc

SEQ ID NO: 218 - DNA, 1694 bp; single-stranded, linear
  immediate source library: HYPONOB01
  immediate source clone: 084009
acggggatgtgccctgcctgccagcacctaggacttcgagttgggttgcagcttatgacatgcatgataggttttggaaggtaacttttaactgcaaacctataaagtactattttttattttataaatgaacagggttttaacgtgctcaactttaatttttttcaattgtatgaaggccttaaaaaagctacattaagcgtantanaaattatttattggactaaaaactaacagaacttcatttccagaannnnnnnnnnnnnnnnnnggcaaatgtttacattcaattaaggggaaaaagtagaaccagcacaaatgagtggcagttgctggagcataactgcttcaataaatcttcatcttggggtaattacaggcaagtcattttcacatcctcttgaggttcagagcatcagaatgaactctatgaatacatgtgtaagtgccagacagctgaatctttatcaggtattgtaaaggtacacatatgatatgtttattaaaattgaaataatgtaaaacacatgaataaatttgcaaaaccaagatcacagtacaccatatgcactctggtaccttaatttttttttataaataataaaagtgaatattgaagcttcttagaaaacaaatgggtccagccctctcctggtggccgcgtttggcgcctgctctctcaccaggcagtgcaaccaccaagccttccagaagcacggtcgctccaccaccacctccgacatgatcgccgaggtgggggccgccttcagcaagctctttgaaacctgagcccgcgcagaccagaagtaaacaggcaccttggacgggggagagcgtgtgtgtgatgggaaaatccggacccacgcgtgtgctgaaggcgtacggtgcttgccagattttcaacttgagcataaattggttgccattgagaatttaagaatctggaatattgcagctcttggttaaacttaatgcatggttggagatgttatggcgacactaaacaaagtattcctgaactttccttagctccttggtagtaactgggaagacagaaatgaagaaaatcacatgagaatgaagaattctttagcagctcaacagagtttctcggcctgctcccagatcggctaagtttctacttgttactctctctgccgacgcccttcgttcctcctctgcttcccttccctagtctttcctccggcagggagctgggcaggggtccccgggtgtctccctgagtcccgactgcactgactgggtccatcagagggctgcttcgttctccagctcatcttcttttaaagtggtgactagcttggtggtatctggctgctggtgtttggcttattgacatactccagggtaatcaatgatgactttgtttggaaacccttttggaggcaccatgggaacagaaggaaacatgagtgacgctgacccttgagtgtgtgggtggggagctctgagacgactcctgtcccacgctctccggtgtccgtgtctacacaggggtccccatgatacccaccggccccagcagggcagaccggaccggggacgggcacggtgaagggctgcagcctggggtctgacgtggcccctagtgctgtctcaggagaaggctctggaggacttgaggcatgctgggcctggtgcagtgatggcgctaaggagacccggggaaagac

SEQ ID NO: 219 - DNA, 224 bp; single-stranded, linear
  immediate source library: HYPONOB01
  immediate source clone: 084374
gggaaacagaggatgtcaatgatatacaagcacattgtatttggagtggctggaaggtggatgcaattgaaattgaattaagactctcaagcaaaggaaaggaagtatgagatttatttagtgcctactatgtgccaaactgaatcttattactattaaatacttgctatttaatgattatatgcagtgtgtctagcagttcacatganttttcatatttngtc

SEQ ID NO: 220 - DNA, 1799 bp; single-stranded, linear
  immediate source library: LIVRNOT01
  immediate source clone: 086674
caccaattcagagacagagtggcactgtttatcataattcccaaagggaaagtagaccagtacagcaaaccactagaagatctgttaggaggagaggtagaactcgagtctttttagagcaagatagagaacgagaacgcagaggtactgcatataccccattctctaattcaaggcttgtgtcaagaataacagtagaagaaggagaagaatccagcagatcctcaactgctgtacgacgacatccaacaatcacactggaccttcaagtgagaaggatccgtcctggagaaaatagagatcgggatagtattgcaaatagaactcgatccagagtagggctagcagaaaatacagtcactattgaaagcaatagtgggggctttcgccgaaccatttctcgtttagagcggtcaggtattcgaacctatgttagtaccataacagttcctcttcgtaggatttctgagaatgagcttgttgagccatcatcagtggctcttcggtcaattttaaggcagatcatgactgggtttggagaactgagttctctaatggaggccgattctgagtcagaacttcaaagaaatggccagcatttaccagacatgcactcagaactgagtaacttaggtacagataacaacaggagccagcacagggaaggttcctctcaagacaggcaggcccaaggagacagcactgaaatgcatggtgaaaacgagaccacccagcctcatactcgaaacagtgacagtaggggtggcaggcagttgcgaaatccaaacaactgaatgtgccagcattgttttgctgagttatttgtgattagctaaccaggatgaaaaataacagattatatatagtttgaactattttccgtgtgcttttttaaacttgttaaaaagaaatttatataaaatttaaaatacaaatgttaaattatccagaaatacagaatagttaatattgctagaaccaaataacctctaaaatgtttttattttggtaattttgtcatgctaagcacttttgtatctgcacaattcagtaggttaagaatcaatcttctttttcttaatagtacagcagactttagcttcaagtttcataggcttagtacttatatctagacatttgtgtctaaataagcttttcattaactttttattttaaggacagtatcttttcatgaaagagtatttggctgaatgtttgctatatatatgttacttgaaatgttaaatttaatatgcagcataccataggtgtatatataggtatataattttaaggttaaaatattcagtctacaagtttggttcttatttaagcttttgggctaatactgcatatggcacaatgtttaatattggcaagttcatctcagagaaaggggattcagatataattttaaagtagagataatttactgaaggcgtctctgacaatctaacttattagacagcaagcaatatataatactgaaaaagtattcagaaatggaaaatttacatcatataggttatttaacttgtgttcagcctttttgtaacttttttgaaagtgcaaacaattctttggattattaaataaggtatacagtatgcatggtttctcaaatttagttttaaaatctaaaagtctataaagaatcagatgcataggcaatatgttaagttcacttggaggctaaaaatctccagtgaaaacaaaacgaaaacctttaagagaatgtagagtttatataaacacaaagtatgcattgaagatctgtttctaccaataaacattaaaac

SEQ ID NO: 221 - DNA, 1274 bp; single-stranded, linear
  immediate source library: LIVRNOT01
  immediate source clone: 087031
gccgatacattctcagggatttatccaaaaaaattaaaaaaagaatgagagcatttattgtactgtatatatattatagtatatgtctgaatattgaaaatataacattaactaatttataaaaaatattctatgtaatgcaaaatacttgaagctgcagtagcttggttttaaacaaaaacaaaaaaaaaactgagagaaaacctatcagaaggactaaaagtacgccttgcttcagggttggctcaggtggtgaacttcatgctgggcatctatgcagagccaccttttggattgcatggttggactgagatctattgggagaaattatatatgtatatatatttatacaacttatgtatacatatatatatgtnnnnnnnnnnnnnnnnnnnnnnnncaccaacaaccaccactacaccacacatgcttataacaggcactagaataaagagggacaacaaaatacacagccagagcagcaagccttagcattaagaatatacaatatgccggaattggggttcgtgcctcctagcctaggaaacttaaaagaaatatccttttgacacaaaacacaaaatgttttccataacaattgacataatgatacattacgcctttgcagtgagctaataataagctaacctttgtgcacaaataacattatatatattatatatctattctgcataggtattttgactttgtgcaggacagaaagttgtgtaggtatgactgttctacttttcagttttctttttttttaatatattttattttctctagaaattactcaaacaaaagcagccttctatcttgccttgtccttaatgctttaaaataaccaaactggagatctaactaccaaactgttcattatattattaaataccaactttggttacagtatagtgtctttactttagctgatggttctgtaaccttgtgctttttaaagcaatttttatgttttggtgcaaaagttgtccagtgtctcttgttcccttcactagagaacatgcttagaggtatgtttgtaggtatttttgtttagaagaactatttcatgcgctccattttatttattataataggtaaaaagaaaaaaaaaggttgtaattcatcacccatgtaaacatgctcatgaagttgaaagtaattaagatttgatacactgatatcaatttatttatgtaactaaatcactgttttataaacttgttaatgatcaacaatttttgttttgattaaaattagttttttgaaagttg

SEQ ID NO: 222 - DNA, 411 bp; single-stranded, linear
  immediate source library: LIVRNOT01
  immediate source clone: 087235
gctggcnggatttgcagaatcatcatnagctaaanccgttggatatttgtgaatttccttttggatctaagcaaaaagaagtttgtatcaacccataccactataaganagtggagagtccagtcttacctccagtattagtgcctcgtcataatgaattcaatccacaacacagccttctggttcagtttaggaacctgagccacaatgaaccacacatgccacaaaatgccacgtttccagattctttccaccagcccaacaacactccttttcccttatctccaaacagcccttatcccccttctcctgctagcagcacatatcccaactccccagcaagttctggaccaggaagtccatttcagctcccagctgatacgcctnctcctgcctatatnccacctgatg

SEQ ID NO: 223 - DNA, 1761 bp; single-stranded, linear
  immediate source library: LIVRNOT01
  immediate source clone: 089993
ttgccaaacagaccttgaaagacaaaactggcantgattcaaattcaacagaatcctctgaaacttccacaggttctctttgtaaagnatccttttctggtcaagtttcttcttcatcantcatgccanttactccattctggaccctccttcagtcaaatgttcctgtgcttcaacctccattacccttggaaatgccaccacccccaccttcacctccagaatcacctncaccccctnctgcaccacctgctnctgcggaagatggtgagatccaggaggtagagatggaggatgagggaagtgaggagccccctgccccaggaacagaggaagatacccctttgaaaccttcagcacaaaccacagttgtaactagccagagttcagttcatctcggctttcccgcgcggcgccgcctcttgctgcgcctccgcctcctcctctgctccgccaccggcttcctcctcctgagcagtcagcccgcgcggcnggccggctccgttatggcgacccgcagccctggcgtcgtgattagtgatgatgaaccaggttatgaccttgatttattttgcatacctaatcattatgctgaggatttggaaagggtgtttattcctcatggactaattatggacaggactgaacgtcttgctcgagatgtgatgaaggagatgggaggccatcacattgtagccctctgtgtgctcaaggggggctataaattctttgctgacctgctggattacatcaaagcactgaatagaaatagtgatagatccattcctatgactgtagattttatcagactgaagagctattgtaatgaccagtcaacaggggacataaaagtaattggtggagatgatctctcaactttaactggaaagaatgtcttgattgtggaagatataattgacactggcaaaacaatgcagactttgctttccttggtcaggcagtataatccaaagatggtcaaggtcgcaagcttgctggtgaaaaggaccccacgaagttcgcgnatataagccagactttgttggatttgaaattccagacaagtttgttgtaggatatgcccttgactataatgaatacttcagggatttgaatcatgtttgtgtcattagtgaaactggaaaagcaaaatacaaagcctaagatgagagttcaagttgagtttggaaacatctggagtcctattgacatcgccagtaaaattatcaatgttctagttctgtggccatctgcttagtagagctttttgcatgtatcttctaagaattttatctgttttgtactttagaaatgtccagttgctgcattcctaaactgtttatttgcactatgagcctatagactatcagttccctttgggcgggattgttgtttaacttgtaaatgaaaaaattctcttaaaccacagcactattgagtgaaaccattgaactcatatctgtaagaaataaagagaagatatattagttttttaattggtattttaatttttatatatgcaggaaagaatagaagtgattgaatattgttaattataccaccgtgtgttagaaaagtaagaagcagtcaattttcacatcaaagacagcatctaagaagttttgttctgtcctggaattattttagtagtgtttcagtaatgttgactgtattttccaacttgttcaaattattacccagtggaatctttgtcagcagtttccttttaaatgcaaatcaaataaaattccccaaaaattt

SEQ ID NO: 224 - DNA, 255 bp; single-stranded, linear
  immediate source library: PITUNOR01
  immediate source clone: 098835
gctccacaatncagccaacgcgaaccanaaagacaagnatgaggctgacctanagaaggagantaanaagctacaacggctgagggaccaaatcaagacatgggtagcgtccaacgagatcaaggacaagaggcagcttatagacaaccgcaagctcattgngacgcaaatngaacggttcaaagttntggaacgagagaccanaaccnaagctttcagcaaagagggcctggggcctngcccagatggttgaat

SEQ ID NO: 225 - DNA, 1865 bp; single-stranded, linear
  immediate source library: BRSTNOT03
  immediate source clone: 1000787
catctctcttgtgcttcctttacacaagtttttttttaaaaaggggaaactcagctttcctttttaaaaaatgcttttttgtatttgcatacgtcactatacatctgagctttataagcgcccgggaggaacaatgagcttggtggacacaatttcattcatgtttccaccgcggagacaagcgcagagcgcagccnacggccacagacagccctgggcatccaccgacggcgcacngnggccagcagagccggaaggcgcggccccgggcagagaaagccgagcagagctgggtggcgtctccgggccgccgctccgacgggccagcgccctccccatgtccctgctcccacgccgcgcccctccggtcagcatgaggctcctggcggccgcnnnnnnnnnnnnnnnnnnnnnnnnntacaccgcgcgtgtggacgggtccaaatgcaagtgctcccggaagggacccaagatccgctacagcgacgtgaagaagctggaaatgaagccaaagtacccgcactgcgaggagaagatggttatcatcaccaccaagagcgtgtccaggtaccgaggtcaggagcactgcctgcaccccaagctgcagagcaccaagcgcttcatcaagtggtacaacgcctggaacgagaagcgcagggtctacgaagaatagggtgaaaaacctcagaagggaaaactccaaaccagttgggagacttgtgcaaaggactttgcagattaaannnnaanatnaaannaannngcctttctttctcacaggcataagacacaaattatatattgttatgaagcactttttacccaacggtcagtttttacattttatagctgcgtgcgaaaggcttccagatgggagacccatctctcttgtgctccagacttcatcacaggctgctttttatcaaaaaggggaaaactcatgcctttcctttttaaaaaaatgcttttttgtatttgtccatacgtcactatacatctgagctttataagcgcccgggaggaacaatgagcttggtggacacatttcattgcagtgttgctccattcctagcttgggaagctttccgcttagaggtcctggcgcctcggcacagctgccacgggctctcctgggcttatggccggtcacagcctcagtgtgactccacagtggcccctgtagccgggcaagcaggagcaggtctctctgcatctgttctctgaggaactcaagtttggttgccagaaaaatgtgcttcattcccccctggttaatttttacacggccttagggaaacatttccaaggatcctgtgatggcgagacaaatgatccttaaaggaaggtgtggggtcttttcccaacctgagggatttctgaaaggtttcacaggtttcaatatttaatgcttcagaagcatgtgaggttcccaacactgtcagcaaaaaccttaggagaaaacttaaaaatatatgaatacatgcgcaatacacagctacagacacacattctgttgacaagggaaaaccttcaaagcatgtttctttccctcaccacaacaggacatgcagtactaaagcaatatatttgtgattccccatgtaattcttcaatgttaaacagtgcagtcctctttcgaaagctaagatgaccatgcgccctttcctctgtacatatacccttaagaacgccccctccacacactgccccccagtatatgccgcattgtactgctgtgttatatgctatgtacatgtcagaaaccattagcattgcatgcaggtttcatattctttctaagatggaaagtaataaaatatatttgaaatgtaaaaaaaaaaaaanttaaaaggncggccgtcggt

SEQ ID NO: 226 - DNA, 2090 bp; single-stranded, linear
  immediate source library: BRSTNOT03
  immediate source clone: 1004415
aagctgttggacacccctttgtaattcagcttggaagaatttatttagatatgcttaatgtatacaagtgcctcagtgaaaatatttctgcagctatccaagctaatggtgaaatggttacaaagcaaccattgattagaagtatgcgaactgtaaaaagggaaactttaaagttaatatctggttgggtgagccgatccaatgatccacagatggtcgctgaaaattttgttccccctctgttggatgcagttcttcattgattatcagagaaatgtcccagctgctagagaaccagaagtgcttagtactatggccataattgtcaacaagttaggggggacatataacagctgaaatacctcaaatatttgatgctgtttttgaatgcacattgaatatgataaataaggactttgaagaatatcctgaacatagaacgaactttttcttactacttcaggctgtcaattctcattgtttcccagcattccttgctattccacctacacagtttaaacttgttttggattccatcatttgggctttcaaacatactatgaggaatgtcgcagatacgggcttacagatactttttacactgttacaaaaatgttgcacaagaaggaagctgcagcttcagagtttttatcaaacttatttttgtgatattctccagcatatcttttctgttgtgacagacacttcacatactgctggtttaacaatgcatgcatcaattcttgcatatatgtttaatttggttgaagaaggaaaaataagtacatcattaaatcctggaaatccagttaacaaccaaatctttcttcaggaatatgtggctaatctccttaagtcggccttccctcacctacaagatgctcaagtaaagctctttgtgacagggcttttcagcttaaatcaagatattcctgctttcaaggaacatttaagagatttcctagttcaaataaaggaatttgcaggtgaagacacttctgatttgtttttggaagagagagaaatagccctacggcaggctgatgaagagaaacataaacgtcaaatgtctgtccctggcatctttaatccacatgagattcccagaagaaatgtgtgattaaaatccaaattcatgctgttttttttctctgcaactcgttagcagaggaaaacagcatgtgggtatttgtcgaccaaaatgatgccaatttgtaaattaaaatgtcacctagtggccctttttcttatgtgtttttttgtataagaaattttctgtgaaatatccttccattgtttaagcttttgttttggtcatctttatttagtttgcatgaagttgaaaattaaggcatttttaaaaattttacttcatgcccatttttgtggctgggctggggggaggaggcaaattcgatttgaacatatacttgtaattctaatgcaaaattatacaatttttcctgtaaacaataccaatttttaattagggagcattttccttctagtctatttcagcctaggaaggaaaggtaatgagtaaaacaaattgcgttgtttaaaggattatagtggcttgcattgtctgaaggttagcacctcttggactgaatcgtttgtctagactacatgtattaccaaagtctctttggcaagattgcagcaagatcatgtgcatatcatcccattgtaaagcgacttcaaaaaatatggggacacagttagttatttttacacagttctttttgtttttgtgtgtgtgtgctgtcgcttgtcgacaacagctttttgttttcctcaatgaggagtgttgctcatttgtgagccttcattaactcgaagtgaaatggttaaaaatatttatcctgttagaataggctgcatctttttaacaactcattaaaaaacaaaacaactctggcttttgagatgacttatactaatttacattgtttaccaagctgtagtgctttaagaacactacttaaaaagcaaaataaacttggtttacatttnaaaaatgnagtngnntntgggngggccntggnnaataggggnggnaanggggcngtnncatgggngncnngggt

SEQ ID NO: 227 - DNA, 516 bp; single-stranded, linear
  immediate source library: ADRENOT01
  immediate source clone: 101411
cggcacgatgcggcacgagctacttctctgctcccccacagttcctctggacttctctggaccacagtcctctgccaagacccccntgccaagacccccagtccaccatgatccatctgggtcacatcctcttcctgcttttgctcccagtggctgcagcttcagacgactccaggagagagatcatcactccctgccttttaccctgggcacttcaggctcttgttccggatgtgggtccctctctctgccgctcctggcaggcctcgtggctgctgatgcggtggcatcgctgctcatcgtgggggcggtgttcctgtgcgcacgcccacgccgcagccccgcccaagaagatggcaaagtctacatcaacatgccaggcaggggctgaccctcctgcagcttggacctttgacttctgaccctctcatcctggatggtgtgtggtggcacaggaacccccgccccaacttttggattgtaataaaacaattgaaacaccanaaanaaaaaaaa

SEQ ID NO: 228 - DNA, 307 bp; single-stranded, linear
  immediate source library: BMARNOT02
  immediate source clone: 103585
gcaatatctgaactgcagtgcatttgccttccactcacagaattcgtgctgattatatgtagttctgacccttaggtctctttccgtgttagctcctgccttgctttggctttgtaatagcagtatcaagctgtgcccggcatgcttgagcattgacacaggtgtcagatttaatgttgaatcactttcaggctccaggttcattgtactttcaagcaatagaggctgcatgtcttcagcaccataacaaagagatactctttcatagtttcgtactataaaattaagtcctaagtctctcaatatt

SEQ ID NO: 229 - DNA, 965 bp; single-stranded, linear
  immediate source library: BMARNOT02
  immediate source clone: 103656
gaccaaagcctgcccgggcttcacaggctgagggtccaccttgccacctccgtttgcctcagtcctcatggagccctggctccactgtctgctggcttctccccatctactctgtgtcactccatccgaccaccattgtctccatcaggacagttggaacacctcttctcagcactctcgcccccacccagtccaccccctacctgacagccagagtgggccatgccagatgcaacccaggtcatgccacacaggtagataaaaccatcttcagcccagccctcaggccctgtgtgctgggaccctgctgggccctctccagcctccccctgcgccaggcctcctccgtcacttcactctggccctgctgttcttttccttttagtttgattaactcactctgcccattccatgctcaaagctgtttccgtgaggaaaggctcctcctgcttcattttagtgccctgaaatgtcacttccttgaggaagtcttccttgaccctccacaccaaaccaggccccctgccacacccctcagagctctccttggaaggcactggcatggctgtttgcgtgattccttgaacgttgtctgtctctcctcctcaccaggcatgtgggtcctgtctgtttctggtgaccgttgtctgtctaacccctagaggagagtttgtcacatggtaggagcttaataaatatgtgttggatgaatgatcagagaaaagagagtgcagagagtggccaaaacagatgctttcagcagtgtatctgccaataaacctaaaggcatgatttgccctggtgatccccccagaggtgcttagtctcttggctgaattccttctggaatncccagaatccccctccttgggaagttttcccagggagtctgaggcaggcaggtctntcagtcaaggncacatgacctcaagtgaaaacaaaaccaatttgctgttttaaaattt

SEQ ID NO: 230 - DNA, 220 bp; single-stranded, linear
  immediate source library: BMARNOT02
  immediate source clone: 103704
gggattacaggcatgagccaccacgcccagcctagtccgacataatgtaggtaaaaagtacctatatttatgcttaacgatacatagacatattccaaaaggatactacagaattaacactgggtacctttttggggaccgggagttgggggggtgcttcaaatcttttactttttacctcatactcgtttacacgatttgaatctctagccatagcatg

SEQ ID NO: 231 - DNA, 230 bp; single-stranded, linear
  immediate source library: BMARNOT02
  immediate source clone: 103933
aaaaagttaaaatttttcaaaacttatgtacactatcacagactgtacacggggtcattctcaggaggaatgcaaaaaaacataaagatgcagtattaaattataacagcataaagtaaaatgtagtacatactgtactactataagantttcataaccacctcctattgctattgtggtgagttcaagtgttttgagtgtctgcttaaaacatcatgtgacaccagtta

SEQ ID NO: 232 - DNA, 2466 bp; single-stranded, linear
  immediate source library: BMARNOT02
  immediate source clone: 104098
ccggagtctattcgaagggggctgctacgtcagcgcgtctcagcgtaagacggcgctattccgctgtaacagcttccggcgggtcctggatgttgatgtcctgcatctaacgcggtgtaacccccgaagccgagcgagctccggaggaatttcagtatctgctacggtaacttcatcagcccgccaagatggcgatgcaagcggccaagagggcgaacattcgacttccacctgaagtaaatcggatattgtatataagaaatttgccatacaaaatcacagctgaagaaatgtatgatatatttgggaaatatggacctattcgtcaaatcagagtggggaacacacctgaaactagaggaacagcttatgtggtctatgaggacatctttgatgccaagaatgcatgtgatcacctatcgggattcaatgtttgtaacagataccttgtggttttgtactataatgccaacagggcatttcagaagatggacacaaagaagaaggaggaacagttgaagcttctcaaggagaaatatggcatcaacacagatccaccaaaataaatgttttctacattttcatttgggctaaatcccacggatnacaactncccacctttttttccctttttaatttaatactaaattgccgccgtcgctcccagccatggctgtctctgcagtcgagggcaaggactctgcgtgcattctccactgccgtctactcggccactccggtcccgacacctagcctgccggaaagaacacccggaaatgaaaggccaccaagaagaaaggcactacctcctaggacagagaaaatggctgttgaccaggactggcctagtgtttacccagttgcagcaccatttaaaccctctgcagtacctcttcctgttcgaatgggttatccagtaaaaaagggcgtgcccatggcaaaggagggaaatctagaacttttaaagattcccaattttctgcatttgactcctgtagcaattaaaaagcactgtgaagcccttaaagatttttgcactgagtggccagccgcactggacagtgacgagaaatgtgagaagcattttccaattgaaattgacagcactgattatgtttcatcaggaccatctgttcggaaccccagagcacgagtagtagtcttaagagtaaagctttccagtttgaatttagatgatcacgcaaagaagaaattaattaaacttgtaggagagcgatactgcaagaccacagatgtgcttaccatcaaaacagataggtgccctttaaggaggcagaattacgattatgcagtgtatctactaacagtgttataccatgagtcttggaatactgaagaatgggaaaaaagtaagactgaagcagacatggaagagtatatatgggaaaatagctcatcagaaagaaatatcctggaaacgcttctccagatgaaagctgctgagaaaaatatggaaataaataaagaagagctccttggtactaaagaaattgaagagtacaaaaagtctgttgttagtcttaaaaatgaggaggaaaatgaaaattccatttctcagtacaaagaatccgtgaagagactattaaatgtgacatgaattatggagtagaaaaatctgcttgatttattaattttatgatatatgtgatcagtatctaatttgatataaaattgaaaatgttaaaaaatcatttttttttcctcagagttaaaattatttccctcatactaatgcttaatggcaatgattactccagagttttttaatttttacactggggcaatagactaggaggtctctgatttcttcttggtctaaagtgttttgattttatttctacataatagctttggtattcatgtatatacatgcatttaattgtgattttatcacctttcccatttctttccccacaagctggcatttcagtagttgcttttgaataatggttttggttacctgggaaggcaggcccagaacccatttccttgacttgcagttccgggctgtgttcacatgactgctgtctagctgatgcatttttcacatttgtcaactctggttagaaacaggtcctcaggagtattctctaacctgatattttctaaaaagatatgttgattcaactttgtttagcatcctactttctagattgtggggctcattttgccagggccaagctaccagaaaagtagaagtggagattacctggtatgtatctctctgggtgccccagttagagctgccacagctcaggaaaaagatgaggcataacgaccttgaatgtaattggagtaagtgacaaaataagaactaccctgggaaaccctgcattcaatgtagctgtcaattcagtatttttaagtacacctgtcagctgtttcttaccacttcgatggttgtgattaatttaaaatcaaaataaaggaattactgagttaaaa

SEQ ID NO: 233 - DNA, 296 bp; single-stranded, linear
  immediate source library: BMARNOT02
  immediate source clone: 104159
cttgacataagaactgtgttcagtttacattttaaaggacgctgtcaaaaggtttgtgtaccatatatttttttcttacaagaatgtagatgatctaaaccaaactcaacgtgaaaaccaagttaaatcctaggtacatgttagaaaagtttatttacacaggtgagtgttacgcatttggagaactgatacactgaaaatttaccaaagcaccaggtgtgtcatttgctcaggtgcagcagaaattaaaatactattatgatttggtccttaactggttagaaaatgccggtctt

SEQ ID NO: 234 - DNA, 2425 bp; single-stranded, linear
  immediate source library: BMARNOT02
  immediate source clone: 104211
gctccgccagcgcttgaaagaggagaagttggagatgctgcagtggaagctttcggcagctggggtaccccaggcagaggcagggctgccacctgtggtggatgccattgatgacgcctctgtggaggaggacttggcagtcgctgtggcaggtggccggttggaagaagtgagcttcctacagccctacccagcccggcgacgtcgagctctgctgagggcttcaggtgtgcgaaggatcgatcgggaggagaagcgggagctgcaggcactgcgccaatcccgggaggattgtggctgtcactgcgataggatctgcgaccctgagacctgcagctgcagcctggcaggcatcaagtgccagatggaccacacagcattcccctgtggctgctgcagggagggctgtgagaaccccatgggccgtgtggaatttaatcaggcaagagttcagacccatttcatccacacactcacccgcctgcagttggaacaggaggctgagagctttagggagctggaggcccctgcccagggcagcccacccagccctggtgaggaggccctggtccctactttcccactggccaagccccccatgaacaatgagctgggagacaacagctgcagcagcgacatgactgattcttccacagcatcttcatcagcatcgggcactagtgaggctcctgactgccccacccacccaggcctgcctggccctggcttccagcctggcgttgatgatgacagcctggcacgcatcttgagtttcagtgactctgacttcggtnnnnnnnnnnnnnnnnnnnnnnnnnggagtgtggggaacctggacaacctcagctgcttccatccagctgacatctttggtactagtgaccctggtggcctggccagctggacccacagctattctggctgtagcttcacatcaggcatcctggatgagaatgccaacctggatgccagctgcttcctaaatggtggccttgaagggtcaagggaaggcagccttcctggcacctcagtgccacccagcatggacgctggccggagtagctcagtggatctcagcttgtcttcttgtgactcctttgagttactccaggctctgccagattatagtctggggcctcactacacatcacagaaggtgtctgacagcctggacaacatcgaggcacctcacttccccctgcctggcctgtctccacctggggatgccagcagttgcttcctggagtccctcatgggcttctccgagccagccgccgaagccctagatccctttattgacagccagtttgaggacactgtcccagcatctctaatggagcctgtgccggtgtgaggaccaggatgtcttttcccagccccaagagacctgttgctgctttcttgtaattatggggctccccagagtctgcgtaacagtcttccactggctggctcacccacaggtgccatgtgcacactcctggttttcaaacaattctctggatttatttatttgttttaacttttctgtgctgaagagaggactggggggagggggcttcccctttcagctgcccggccccccacacccacagcttgctcttctatctccacaacgtgagcctggaagaggagaaaatgtggctcctctggagcttggcagaccacttttcggtctttgcgtgatgttccttagcccaaagacggtgagacagggctgaaatcaggtggcttctgccaccctgagccctagacccatgggtggctaaatccactggactgtgaagactataatttatttccataatttatttggagattgaggaggctttggttgcacttctttggctggtgggtaatgccaggggtggggtgggcacaggccctcaagagccccttttgccttgtagtcctacaccttgccctgcctgggctttggtgcagactaggtgtggatttgagctctgtgatctatgtctgctgcctggctcctagatggctctgtgggcaggtgctggccaagggacatcatctaggcagggggagagcctgggctgaacagctgtgaccaaaactcccttctgccccaccctgccccctccacttcctgccctctgttccatcttcccccttcccaaaggccacagcctttattccaggcccagggatgtaggagggggaaggaggaaacaggaagcccagagagggcaaagggcctacctcggggcgcgaaccatgccccagactattatctcagggctttctgggcatgcacttcagcgtggcccacctgcccatgccctgaggccagttggcgaggggtggtcctgaggggttttaataccctttgtttnntatgttaattttgcatcataatttcctacatgtccctgagtgtcagacttaaaattatccattcccccaa

SEQ ID NO: 235 - DNA, 207 bp; single-stranded, linear
  immediate source library: BMARNOT02
  immediate source clone: 104368
ttgctgaacacttaatgcctttgtgttttgggctatattttgaattattctcatagatttctagaagaggaattactgggcaaatagggacacttaaaaatagcttttacaaaccatcttctgttctcattgaaaatgagaatatattatgcacttacagggaacttgactttgcttttcaagaacagaagttctaaaatacagtag

SEQ ID NO: 236 - DNA, 526 bp; single-stranded, linear
  immediate source library: BMARNOT02
  immediate source clone: 104451
cggacggtggncggggtcaccgggaggagacgccatgacgnccgccctcacagccctgctctgccttgggctgagtctgggccccaggacccgcgtgcaggcagggcccttccccaaacccaccctctgggctgagccaggctctgtgatcagctgggggagccccgtgaccatctggtgtcaggggagcctggaggcccaggagtaccgacttggggcccctgggaggagacgccatgatccccaccttcacggctctgctctgcctcgggctgagtctgggccccaggacccacatgcaggcagggcccctccccaaacccaccctctgggctgagccaggctctgtgatcagctgggggaactctgtgaccatctggtgtcaggggaccctggaggctcgggagtaccgtctggataaagaggaaagcccagcaccctgggacagacagaacccactggagcccaagaacaaggccagattctccatcccatccatgacagaggactatgcagggagataccg

SEQ ID NO: 237 - DNA, 604 bp; single-stranded, linear
  immediate source library: BMARNOT02
  immediate source clone: 104731
caagctgcttgatgggaacctactagatggacaggctgaggtgtttggcagtgatgatgaccacattcagtttgtgcaggtacacattgcacagtctgaggtaacctcaggttaaaatttgactagagaatttgatagcatacttaaattttcctttaataaaggaaagtggaccaatttcattggtataactggacagaaacatttttgggagaaaacaagcatatcttagagttagtatttttgccacatgaaaagatattaacaaattaggaaaccctattgaaatttttttctcataaagcaggaattacaaacagtaaaggccaataagatggaacaatatagaaattatttgggaagattatgaaaagcagttgtttgtgtcaggcatgactgatagtttttttttaaaaaggggcagggggacttaaattgttgatggctatgaaagaaatttttggatgttaccttaactactgagctgtcttactggaaattagaaatggtatagttaagatggactatacaatgtaataagtctaaaagtggtggatcatatgttaaaacctgatctagatgtttctttaaccaagatgaatta

SEQ ID NO: 238 - DNA, 975 bp; single-stranded, linear
  immediate source library: BMARNOT02
  immediate source clone: 104903
agcctacccagccgtcgggcctttgctggctgcgccatggctgaaggcagcgtctttagcctgggtggcctgcagcagcctgggccccacaacttctactctcgcccacactttgtcaacactgtggagatgtttgacctggagcatgggtcctggaccaaattgccccgcagcctgcgcatgagggataagagggcagactttgtggttgggtcccttgggggccacattgtggccattgggggccttggaaaccagccatgtcctttgggctctgtggagagctttagccttgcacggcggcgctgggaggcattgcctgccatgcccactgcccgctgctcctgctctagtctgcaggctggggccccggctgtttgttattgggggtgtggcccagggccccagtcaagccgtggaggcactgtgtctgcgtgatggggtctgaaggcttggtgggagctgtccactggagcagctcattgccagaggcagctatttctatggctccttttgctgctgaggacactcactgtggctctgtgggatgagagaggcatgggggtgagcacttgaaacactgccttggggccttgggttaggggagcctttgtctttagtgcaggacacacatatgcttacacctacctttatcaccattcgttcatgaatcatgcctagctccatccttgccctgggacctactaggccttccatccaactgggaaatggggagaagcaaagctggcctcatgctcttcagggtcagttcctatctggagttgaccaggcctaccccagttgccattcctgaaaaatctcagctgccaggctgcctttagggtccctgtagacccaggagagttgagagggtgggggacacagagagaatagagaggatgtgggaactgccagagggccggagcgcaggagttcaagtggaggaatgctggctttgagccctctacactgctg

SEQ ID NO: 239 - DNA, 757 bp; single-stranded, linear
  immediate source library: BMARNOT02
  immediate source clone: 104965
tttccccatctttagaatggggagggtggacactggaaacnagatgattnctttaacctccaaagnncccttagtttctatgaaaatattgggggtaggggggtggattaggagattgaagggttgagaagaaagagaaattgtccaaagagtcctcagaacctgcctggagaaatgcgcatgggggtgggcctggtaagtcccaggaaccacaggaagtgagctaaggctcacccagagcagctgggtctccaggctgcctgggctttttgtcctcatgaacaactctggagcagctgtctgtccctcagagggcacctgggaggcagcaaagattatcttatttattttattttgttttctgctatatttagagtggcaaaaaagtggagcagagggtttctgctgtctccagactgtctaccaaagagtaaggcgacagaatgcctcctgggtttggaagggggatgcactgtgggatctgccatccattctgcagtctccagcagagcaggcagtcaggccccagcgtgcctccatcccagtgccccgatgaccatctggtcagccctcccaacctcccttccagggggcttaccagcaaagccatattcggctaggaatttggaattcacaacctttattaacccctgggaaaaacttccgattgcatgtcaaatcacattgaagactgaaaattagnttttattactngttttccnntaagagatagnaaagccnccttatnanaattaaa

SEQ ID NO: 240 - DNA, 180 bp; single-stranded, linear
  immediate source library: BMARNOT02
  immediate source clone: 105088
gtcctaatcaagtccaaaacctggcaaggcaaattctgttaggtcttaagaaaaaccctctttggcttgatgccctgatttccaggcccagtggtgtctcagcntcacctctggctctgtagttggcctactccatctgccctgcctgaagtntcggtctttnagtttggtggggtccca

SEQ ID NO: 241 - DNA, 264 bp; single-stranded, linear
  immediate source library: BMARNOT02
  immediate source clone: 105363
gcgaggcggaaaaaatatttctcccagcttgtgttgatgccgcgattttgactgagacttcttcccacgatttctgtttttgcttctccaaggaaaatggcagctcccgagcagccgcttgcgatatcaaggggatgcacgagctcctcctcgctttccccgcctcggggcgaccgaacccttctggtcaggcacctgccggctgagcttactgctgaggagaaagaggacttgctgaagtacttcggggctcagtctgtgcgg

SEQ ID NO: 242 - DNA, 1790 bp; single-stranded, linear
  immediate source library: AMLBNOT01
  immediate source clone: 108082
gaacttacgagaggtgttaaaaaaatatggtaaagatgttggtcttcatattaaagctgtaagatcctatagtcagcagntgttcctggnattgaaactccttaaaagatgcaatatcctacatgcagatatcaagccagacaatatcctggttaatgaatccaaaactattttaaagctttgcgattttgggtcggcttcacatgttgcggataatgacataacaccttatcttgtcagtagattttatcgtgctcctggaaatcattataggtaaaagctatgactatggtatagatatgtggtctgtaggttgcaccttatacgaactctatactggaaaaattttattccctggcaaaaccaataaccatatgctgaagcttgcaatggatctcaaaggaaagatgccaaataagatgattcgaaaaggtgtgttcaaagatcagcattttgatcaaaatctcaacttcatgtacatagaagttgataaagtaacagagagggagaaagttactgttatgagcaccattaatccaactaaggacctgttggctgacttgattgggtgccagagacttcctgaagaccaacgtaagaaagtacaccagctaaaggacttgttggaccagattctgatgttggacccagctaaacgaattagcatcaaccaggncctacagcacgncttcatccagggaaaaatttaaacaagatgcatgatatatttgaattaacaccaagggtgatatttcttttagagatgttagttaatctgttttgtgtcttacgtgaaatttcactgtagactgttttaaattgccaagactgcacaaaattacagtgctaatgtatatggttgcagttcacataaagacaaaagcatctgttatgaaatgagtagtaatattgggtggttgatttgttcttagcagacttggcttcattttggtcttgagataaaatggccagcataaatgctgtttatattcacgttttcctaggtgtgtgtgtgcaggccacagcagcatgcccttgggtgtagtcagtgccgaaaggggtctgttccttcttgagcctgcctgcagggatggtctccttttaaagcaggttgtgtgcagcattcagtacactgaaggtaagctaaaccatcaacatctctggtgttttaagatgttattttattggaacaactgacaaatgagggatgttagctttgtggcagaattccctgcatgtgtgataactgatcttgttttattttttggcattgcaactgtggcatagttacaatttctgtttgttcatcacatttaaaattggaagagaacgcgcttgatggatagagcgccttcagtgtactgtttcttattaactttactttttttaaatcaacttgctatagactttatatacattttgttaaatatagttcctagtgacatagaaacgatgcgtagttttcatttactaattacaaatgttgaggcctaattctgaaagtcctcatatttaaaggctagacaacgtaatgaaatttttaactatttgtatgtcattttgaaagtgtactgctttatggtaaaagtgtttttcatttgttcattgttttcattatttgtgatcatgttgtctttcaatacaggcataaaccttccactcttgaacaaagcagctgctttttaaaagcggtaattgcttctttaccttttatttcttttgtaaatgaagcttttctttaagaatgtgactttaaagtgttgtctattgcataaaacagttgacactca

SEQ ID NO: 243 - DNA, 447 bp; single-stranded, linear
  immediate source library: AMLBNOT01
  immediate source clone: 108465
aatgcggaataccctacagcaaaagtgttcacattactgagcaaactatagtgtggtattctgcagtgactatgggaaagccttgaatgttctatcggtttttaagggacttgagaattaattctggagagaatgccccattgaacatcatcaatattggagagctttctgtttttctacatttgttaggaaacttgtgagcattcacactacagagaaacttgaaatataaagaagaagagaaagccttcagtgatgcctctgtgttagggaaaatatggaacttctccctggatgcaaaacctatgagtatattaatattggaaaatttttcagtgattctcctctttcttgtatatgagagaacttatatggagaaacccctaggaatgtaatcagtgttaggatgcctcagcctgaactcttcactgagtggccacaattttc

SEQ ID NO: 244 - DNA, 461 bp; single-stranded, linear
  immediate source library: AMLBNOT01
  immediate source clone: 108608
gctgcgcagagccctgtcgcaatgccccagcaagcttcttgttggcatgtggccactctaaattgtgctccaggatctgctatgggtccatgcttgcaggagaaacagctgtgtagaatttcctattgcatttcatttgtgggtttagaactcggttgcttatttcatattgtctcccttttcagtccttcaaggtacatttttccaacttctctaatgaattattacatttctgagtagctgatatgtttttatcttatctaagcagtatatttataattccttctttgcattggctaatctgattagtagttcagaacccaattttcagattgtctatagcaaactgtgaagaactgtgctgtcaagtagaaatagaatataagccacatatgtaatttaaacttttctaataccacattaaaaactataaaaggggaggaaatgggaaaattagtaaa

SEQ ID NO: 245 - DNA, 539 bp; single-stranded, linear
  immediate source library: AMLBNOT01
  immediate source clone: 108762
cttaaaatgaaattatggttcttaatgatagtggcttgttacatctcttatagccccacataggttagattttncaatataaaattagaggataggcacattctttctttttagatgcttaagaaattacctcacataaacattttaccatttaaaaaatgatgtttaccagtccatttcagttcttcaactgaggtccattataaaatatactacttttgctgtataccaagctacagttgtagatattgattcaagtaaaggtgatacttcctcttccagttgatttttatactcttaatttgtgtatacatacattttcacacatgaatatgtgtgtgtaagagacagagtgcattcatttgcacccagggttggaggaaagaagagaaagaaatgagaatatgtatattggagatacttggctatttgtacctcacctgcccatgaaggctaaaaatggatggttaaacacctgtctctgtgctcatgatgaaaatgacctttgcaaaanaananganntcaganngngtagccc

SEQ ID NO: 246 - DNA, 785 bp; single-stranded, linear
  immediate source library: AMLBNOT01
  immediate source clone: 108819
ataaatttgagtggaccagaatggagtttcagacctgggctttatatgtggcaaatcgctatgattactctgtggagtttactggtgtcggggaaccaccagctggagctgagaatgttggatactgtacccagataggaatcttccggaaaaatggaggaaaggcaacagaatcatgtctttcagagcagcatgatcagcatgtttataaagctgtttttaccacctcatacccaagcttacagcaggaaaggttctttaaacttgtgttggttaatgaggtgtcccaacaagtggaaagcttaagagtgagccacctgccaaggcggaaagaacaggctggggaacggggtgataagcccaaagacattggtggctcaaaggcccctgtcccatgctttggaccagtcttcacagaggttgagaaggccaagatagagaactctcccacacccttctgtgttggagataaatttttcgtacctctgcagagactccttgcgtatcccaagttgaaccgcttatgtgctaatgaagagatgatgagatcagtcattgctgactcaattcctctgagcagtgatggttctgcagtggtggctgacctgcgtaattattttgatgaacagtttgagttttgaaccatgtttatttcctgaaatttcagggtctcagcgatagttgtgctcacttagaatttagttttttttgtgtaatcctaattcaagtaatgtttttaaagtttcactgcaaaagtctatgttccaagccattggacagacctg

SEQ ID NO: 247 - DNA, 761 bp; single-stranded, linear
  immediate source library: AMLBNOT01
  immediate source clone: 109390
gtgagccacggcgcccagcctcaattgtgttttctctgccctgggaagagatcatagacaaatggaggcaggggagctgactcactgatggagcgaggtctgcattccacgggttttctgtgcagttatgggagcatgacaggggaggctccaaaatggaggttgagctgggtcttatagaataaataagtttgctgggaccagagacatgggtgtgcacagactcagaggcaagaaagttgtatgatgagggtgggggggtgtgcggatagaggttgaagcccaaaagccctgaaagttcagtgttgaggctcagggtggggaccctagagaggcaaaagatgcccagccagatggaattggtggtgtgaattgccagggactggaaagagcccagatgggggctgcagcatgggccttggttgaagcctctaatcctgtaagggctgctttggcccaagaggccttagaaacccggtgtaagcctcaatcggtagccggtctggcctctttctcacacttaaccgacacagctcttgctctgatctcatcccaagtcatctcgctggaggacaattaactcggcttcaaaatggccctcagcctggagccaagatttagggagcaagaccgtctagttgggagagaagatgtttttgggagagttgaagacttcttgaaaaagttcgaaaagttcttgaaaaagcaaaggatgcttctttccgtctgggagagggaaaacctctcccagggcaaaagga

SEQ ID NO: 248 - DNA, 329 bp; single-stranded, linear
  immediate source library: AMLBNOT01
  immediate source clone: 109451
gtgcgttggggcctcagcctttatctccactctgcggagattcacgcctggaaaacgctcttctgagaggatctgtggaggtcaacccaggagagagaagacaggactgaagcactgaaagggtcctgccgttaagggcgcaggattgtatagaatatataatagcagtagcagctctgtttacggagcattaaccttacgtggagttatttcctgcatttcctccctttcgtctttacaaggtagccgtttggcgtcgtgaggatggatgttcccatccctaatttgcaaaatggtactgggtcagggagtagatagtttgtgacagc

SEQ ID NO: 249 - DNA, 301 bp; single-stranded, linear
  immediate source library: AMLBNOT01
  immediate source clone: 109706
ctcgagccgttcttcgctcacagatatttactaaacatctcctctgtgctggcccaggatatacaaagagcccaagaacctgcaacttaacagtctctgtgggaaattcttaagtcataggaaggtttaaaactccagtgctcaggaacttcttagagctgctaaagggataaaccaggagtggtgttgagaccaagggccgactcctgggctctgccttcatagattctggatcagtagattgggatgggacctatctgtttgttatccagcactaggtacatggttctcatgcacaatt

SEQ ID NO: 250 - DNA, 292 bp; single-stranded, linear
  immediate source library: AMLBNOT01
  immediate source clone: 109719
agaaaattaaaataatctctaatcctactacctagaataaaacactattaatattttggtctgtttcctgccaaggtgttttctgtgtatacatggatattttgtttgtttttaaacaaaacgatgggatcattctgaacatactgttctatagtatggtcagctaataatatatcagacctttttttatattattaaatattctacaactttttaaaaatgtctattaatattccatcgtatagatgtgatataatttgcttgatggttgtctcttaaaaagaaagatagc

SEQ ID NO: 251 - DNA, 1116 bp; single-stranded, linear
  immediate source library: TESTNOT01
  immediate source clone: 114110
atagctactccagggaccagactcgctggacctcaaactgtacagcttagcaagccaagtnttgaaaaacagacagttaaatctcacacagaaacagatgagaaacaaacagagagccgcaccatcaccccacctgctgcacccaaaccaaaacgggaggagaaccctcagaaactttgccttcatggtgtctctagggttggtaacacatgaccatctagaagaaatccaaagcaagaggcaagagcgaaaaagaagaacaacagcaaatccggtctacagtggagcagtctttgagccagagcgtacaagcagcaaaagaagaagagaaacagaagttacttaaatggagttcagatttaaaacaagaacgagaacaactagagcaaaaggtgaaacagctcagcaattccataagtaaatgcatggaaatgaagaacaccatcctggcccggcagaaggagatgcacagctccctggagaaggtaaaacagctgattcgcctcatccacggcatcgacctctccaaacctgtagactctgaggccactgtgggggccatctccaatggcccggactgcaccccccctgccaatgccgccacctccacgccggccccttccccctcctcccagagctgcacagcgaactgtaaccagggggaagagactaaataacagagcccctctaggagaagccacgggatcccggcggcaaggagaacagaacactgaagactctagaaaagcaaagccggatttctggaaagtgcagaattcttttggttctttggttccanagagagagaagatgcttgtgccaggtggcaccagagtttgccaattgatccttcttattctgtgtgtacatgcaaagattggaccatgttacatgaaatagtgccagctggaggttctttgccagcaccatgccaagtgaaataatatatttactctctctattatacaccagtgtgtgcctgcagcagcctccacagccacgatgggtttgtttctgttttcttgggtggggagcagngncgnnccgtnggggaggagagcaggtttnanntccttactttcccgagncnttttttttaggttnggggannacaac

SEQ ID NO: 252 - DNA, 1176 bp; single-stranded, linear
  immediate source library: TESTNOT01
  immediate source clone: 114495
ccccgcctcagtccctggggcttggccccgctcttccgttccgtccgctccaagctggagagctttgctgacatcttcctcacgnccaacaaaaccccacagcccccacccccgtcccccccaatgaagctggagttgaagatcgccatctcagaggccgagcagtctggggctgctgagggcactgcgtctgtcagcccccggcccccaatccgccagtggcgaactcaggaccacaataccccagcacttctccctaagccctctctgggccgaagctactcctgccctgatctggggccccctggcccaggtacctgcacctggccacctgctccaccccaaccaagccgaccacggccgcggcggcacactgtgggtggtggggaaatggcccgagccccgccaccccctcggccctgtctccggaaagaggtcttccctctcggaggagtgggagcctccccttctctcaccacatcttgctcgtccacggcatccacttccttctccgaaccagcagaacccaggttgggttcaaccaaagggaaggagccaagagcctcaaaggaccaggtgctttcagaacctgagaccaagaccatgggaaaggtttctcgtattcagaatacgcagaacaccagcccgtcctcagctaaaccttacaccaatgggactgcctcgaccaatcaggttgaacaagaaggagttcagcttggaagaaatttacaccaacaagaattaccaatcacccacaaccaggaggacctttgagaccatctttgaggaaccccggggagcgcaatgggactctgattttcaccagctcaaggaagctccggcgggctgtggaatttcgggacagcagccttcctcgatcacgaagaccgtcccgtggggtccgggctgcagggggcaggactgttcctcccaatgtggcccccagccctgatgtgggccccctgctccagcagcggctggaggagctagatgccttgctcctggaggaagaaacagtagatcgggagcagccccactggacctaggtgccccatctgttggtcatccatcctgaagggacaggaaacctcccaggcagttatttttttttctctatatttctagtaaagttttcgatatgtttctgaaaaaaaaaaaaaannnnnnannntnaaa

SEQ ID NO: 253 - DNA, 1791 bp; single-stranded, linear
  immediate source library: BRSTTUT01
  immediate source clone: 1216210
cctcggttccagtcttccctttaaaagcctgtggcatttttcctccttctccctaactttagaaatgttgtacttggctattttgattagggaagagggatgtggtctctgatctctgttgtcttcttgggtctttggggttgaagggatggggaaggcaggccagaagggaatggagacattcgaggcggcctcaggagtggatgcgatctgtctctcctggctccactcttgccgccttccagctctgagtcttgggaatgttgttacccttgggaagataaagctgggtcttcaggaactcagtgtctgggaggaaagcatggcccagcattcaagcatgtgttcctttctgcagtggttctttatcaccacctccctcccagccccagcgcctcagccccagccccagctccagccctgaggacagctctggatgggagagctgggccccctgagcccactgggtcttcagggtgcactggaagctggtgttcgctgtcccctgtgcacttctcgcactggggcatggagtgcccatgcatactctgctgccggtcccctcacctgcacttgaggggtctgggcagtccctcctctccccagtgtccacagtcactgagccagacggtcggttggaacatgagactcgaggctgagcgtggatctgaacaccacagcccctgtacttgggttgcctcttgtccctgaacttcgttgtaccagtgcatggagagaaaattttgtcctcttgtcttagagttgtgtgtaaatcaaggaagccatcattaaattgttttatttctctctggngtncgnctttgctggcccagcaagcctagataagcatgaagctcttatctttggtggctgtggtcgggtgtttgctggtgcccccagctgaagccaacaaagagttctgaagatatccggtgcaaatgcatctgtccaccttatagaaacatccagtgggcacatttacaaccagaatgtatcccagaaggactgcaactgcctgcacgtggtggagcccatgccagtgcctggccatgacgtggaggcctactgcctgctgtgcgagtgcaggtacgaggagcgcagaccaccaccatcaaggtcatcattgtcatctacctgtccgtggtgggtgccctgttgctctacatggccttcctgatgctggtggaccctctgatccgaaagccggatgcatacactgagcaactgcacaatgaggaggagaatgaggatgctcgctctatggcagcagctgctgcatccctcgggggaccccgagcaaacacagtcctggagcgtgtggaaggtgcccagcagcggtggaagctgcaggtgcaggagcagcggaagacagtcttcgatcggcacaagatgctcagctagatgggctggtgtggttgggtcaaggccccaacaccatggctgccagcttccaggctggacaaagcagggggctacttctcccttccctcggttccagtcttccctttaaaagcctgtggcatttttcctccttctccctaactttagaaatgttgtacttgggctattttgattagggaagagggatgtggtctcttgatctccgttgtcttctttggggtcttttgggggtttgaaaggggaagggggggaaaggcnagggcccaagaaaggggaaattgggaggaacnatttccgnagggccgggcccttcaagggaagttggggattgccggatccttggtcnttnttcccctggggntttcccaacttnttttggccccgggcctt

SEQ ID NO: 254 - DNA, 2595 bp; single-stranded, linear
  immediate source library: NEUTGMT01
  immediate source clone: 1217861
cactttgcaaactctgtatttatttggattaaaaagctttagatgaacaacaaaaaaaagatacatacatgttataagactagttaccacgtaaacctcagatgatatgatacagaaattagaataaaccaagttttaatcaggtatgaaaacattcaagctcaaaatcatctcgagccgaattcggctcgaggcgccatggtcacccacagcaagtttcccgccgccgggatgagccgccccctggacaccagcctgcgnctcaagaccttcagctccaagagcgagtaccagctggtggtgaacgcagtgcggcaagtgcaggagagcggcttctactggagcgcagtgaccggcggcgaggcgaacctgctgctcagtgccgagcccgccggcacctttctgatccgcgacagttcggaccagcgccacttcttcacgctcagcgtcaagacccagtctgggaccaagaacctgcgcatccagtgtgaggggggcagcttctctctgcagagcgatccccggagcacgcagcccgtgccccgcttcgactgcgtgctcaagctggtgcaccactacatgccgccccctggagccccctccttcccctcgccacctactgaaccctcctccgaggtgcccgagcagccgtctgcccagccactccctgggagtccccccagaagagcctattacatctactccgggggcgagaagatccccctggtgttgagccggcccctctcctccaacgtggccactcttcagcatctctgtcggaagaccgtcaacggccacctggactcctatgagaaagtcacccagctgccggggcccattcgggagttcctggaccagtacgatgccccgctttaaggggtaaagggcgcaaagggcatgggtcgggagaggggacgcaggcccctctcctccgtggcacatggcacaagcacaagaagccaaccaggagagagtcctgtagctctggggggaaagagggcggacaggcccctccctctgccctctccctgcagaatgtggcaggcggacctggaatgtgttggagggaagggggagtaccacctgagtctccagcttctccggaggagccagctgtcctggtgggacgatagcaaccacaagtggattctccttcaattcctcagcttcccctctgcctccaaacaggggacacttcgggaatgctgaactaatgagaactgccagggaatcttcaaactttccaacggaacttgtttgctctttgatttggtttaaacctgagctggttgtggagcctgggaaaggtggaagagagagaggtcctgagggccccagggctgcgggctggcgaaggaaatggtcacaccccccgcccaccccaggcgaggatcctggtgacatgctcctctccctggctccggggagaagggcttggggtgacctgaagggaaccatcctgggtaccccacatcctctcctccgggacagtcaccgaaaacacaggttccaaagtctacctggtgcctgagagcccagggcccttcctccgttttaagggggaagcaacatttggaggggatggatgggctggtcagctggtctccttttcctactcatactataccttcctggtacctgggtggatggagcgggaggatggaggagacgggacatctttcacctcaggctcctggtagagaagacaggggattctactctgtgcctcctgactatgtctggctaagagattcgccttaaatgctccctgtcccatggagagggacccagcataggaaagccacatacttcagcctgggtgggtggagaggctgagggactcactggagggtcaccaagccagcccacagccagggaagtggggagggggggcggaaacccatgcctcccagctgagcactggggaatgtcagcccagttaagtattggccagtcaggcgcctcgtggtcagagcagagccaccaggtcccactgccccgagccctgcacagccctccctcctgcctgggtgggggaggctggaggtcattggagaggctggactgctgccaccccgggtgctcccgctctgccatagcactgatcagtgacaatttacaggaatgtagcagcgatgggnacaattacctgggaacagttttttgtttttgtttttgtttttgtttttgtgggggggggcaactaaacaaacacaaagtattctgtgtcaggtattgggctggacagggcagttgtgtgttggggtggtttttttctctatttttttgtttgtttcttgttttttaataatgtttacaatctgcctcaatcactctgtcttttataaagattccacctccagtcctctctcctcccccctactcaggcccttgaggctattaggagatgcttgaagaactcaacaaaatcccaatccaagtcaaactttgcacatatttatatttatattcagaaaagaaacatttcagtaatttataataaagagcactattttttaatgaaanaanntannnttanatanantaatnaaantntanntanttatttnnttgncttttttnttnttccttttt

SEQ ID NO: 255 - DNA, 950 bp; single-stranded, linear
  immediate source library: NEUTGMT01
  immediate source clone: 1218519
gttgttggtggatgaaccaagaatccacattttaagagatgttaaaggacgtaaaatttcgttgtaccctttatataccttttatagcaggtagtttttcaacatcagttatcttttcctcctcccagggtgctgttggcccaaaggttgccctgaagccccccatccagaggaagcaaggagccggagctcccacagcaccctaggggggcacctgcgcctgtgtggaaatttggagaagttgcggcagagaagccatgcgttccagcgttccacggtccagctagtgccgctcagccctagaccctgactttgcaggctcagctgctgttctaacctcagtaatgcatctacctgagaggctcctgctgtccacgccctcagccaattccttctccccgccttggccacgtgtagccccagctgtctgcaggcaccaggctgggatgagctgtgtgcttgcgggtgcgtgtgtgtgtacgtgtctccaggtggccgctggtctcccgctgtgttcagggaggccacatatacagcccctcccagccacacctgcccctgctctggggcctgctgagccggctgccctgggcacccggttccaggcagcacagacgtggggcatccccagaaagactccatcccaggaccaggttcccctgcgtgctcttcgagagggtgtcagtgagcagactgcaccccaagctcccgactccaggtcccctgatcttggggcctgtttcccatgggattcaagagggacagccccagctttgtgtgtgtttaagcttaggaatcgcctttatggaaagggctatgtgggagagtcagctatcttgtctggttttcttgagacctcagatgtgtgttcagcagggctgaaagcttttattctttaataatgagaaatgtatattttactaataaattattgaccgagaaaaaaaaaa

SEQ ID NO: 256 - DNA, 737 bp; single-stranded, linear
  immediate source library: LUNGNOT01
  immediate source clone: 122762
gtggagctccctgtacgcgcggccctagtcggctcctcaacgtggagcgatgggaggccttgagaagaagaagtatgaacgaggctcggccaccaactacatcacccggaacaaagcccggaagaagctccagctgagcttggctgactttaggcggctgtgcattctgaagggcatttatccccatgaacccaaacacaagaagaaggttaacaagggttctacagcagcccgaacgttttaccttatcaaagacatcaggtttctcctccacgaacccattgtcaacaagttccgtgaatacaaggtgttcgtccggaagctccggaaggcttatgggaagagcgagtggaacactgtagagcgtttaaaggacaataagcccaactacaaactcgaccacatcatcaaggaacggtatcccacgttcatcgatgccctgcgggacctgggacgatgccctctncatgtgcttcctgttttccaccttcccgcggactggcaagtgccacgtgcagaccattcagctgtgccgccggctcactgtggagttcatgcactacattatcgctgcccgtgccctgcgcaaggtcttcctgtccatcaaaggcatttactaccaggccgaggtactggggcagcccatcgtgtggatcactccctatgccttctnccatgaccacccgacagacgtggactacagggtcatggccaccttcaccgagttctacaccacg

SEQ ID NO: 257 - DNA, 2580 bp; single-stranded, linear
  immediate source library: LUNGFET03
  immediate source clone: 1234356
ggggtgagccaccgtgcccaacctcacttgcttcttatccttacactcccccagccccagagaaactgccacatacaccacaaaaaccaaacatcccccaatgaccttaggccccattggctccattcactcccaggtgagaattcagggcaaacgtccacaaaggtcacaggcagcgtaccatacggttctgttataccccatatattaccccttcatgtcctaaagaagacattttgtgcttagagattttcattttagtgtatctttaaaaaaaaaatcttgtgttaacttgcctccatctttttcttgggtgaggacacccagggaatgacccttttgtgtctatgatgttgctgttcacagcttttcttgataggcctagtacaatcttgggaacagggttactgtatactgaaggtctgacagtagctcttagactcgcctatcttaggtagtcatgctgtgcattttttttttcattggtgtactgtgtttgatttgtctcatatatttggagtttttctgaaaaatggagcagtaatgcagcatcaacctattaaaatacattttaagccttttaaaaaaaaggcaccgagctccgtcgtctcgtttccggcggtcgcgcgctcttttctcgggacgggagaggccgtgtagcgtcgccgttactccgaaggagataccagtcggtagaggagaagtcgaggttagagggaactggggaggcactttgctgtctgcaatcgaagttgagggtgcaaaaatgcagagtaataaaacttttaacttggagaagcaaaaccatactccaagaaagcatcatcaacatcancannggcagcagcatttttgnagcancantanntaccgccaccaccgccaatacctgcaaatgggcaacaggccagcagccaaaatgaaggcttgacctatttgacctgaagaattttagaaaaccaggagagaagaccttcacccaacgaagccgtctttttgtgggaaatcttcctcccgacatnacngaggaagaaatgaggaaactanttgagaaatatggaaaggcaggcgaagtcttcattcataaggataaaggatttgagctttatccgcttggaaacccgcaaccctagcggagattgccaaagtggagctggacaatatgccactccgtggaaagcagctgcgtgtgcgctttgcctgccatagtgcatcccttacagttcgaaaccttcctcagtatgtgtccaacgaactgctggaagaagccttttctgtgtttggccaggtagagagggctgtagtcattgtggatgatcgaggaaggccctcaggaaaaggcattgttgagttctcagggaagccagctgctcggaaagctctggacagatgcagtgaaggctccttcctgctaaccacatttcctcgtcctgtgactgtggagcccatggaccagttagatgatgaagagggacttccagagaagctggttataaaaaaccagcaatttcacaaggaacgagagcagccacccagatttgcacagcctggctcctttgagtatgaatatgccatgcgctggaaggcactcattgagatggagaagcagcagcaggaccaagtggaccgcaacatcaaggaggctcgtgagaagctggagatggagatggaagctgcacgccatgagcaccaggtcatgctaatgagacaggatttgatgaggcgccaagaagaacttcggaggatggaagagctgcacaaccaagaggtgcaaaaacgaaagcaactggagctcaggcaggaggaagaagcgcaggcgccgtgaagaagagatgcggcggcagcaagaagaaatgatgcggcgacagcaggaaggattcaagggaaccttccctgatgcgagagagcaggagattcggatgggtcagatggctatgggaggtgctatgggcataaacaacagaggtgccatgccccctgctcctgtgccagctggtaccccagctcctccaggacctgccactatgaatgccggatggaactttgggattgaccccaccaacaactgaacgctttggtcaggctgctacaatggaaggaattggggcaattggtggaactcctcctgcattcaaccgtgcagctcctggagctgaatttgccccaaacaaacgtcgccgatactaataaagttgcagtgtctagtttctcaaaacccttaaaagaaggaccctttttggactagccagaattctaccctgggaaaagtgttagggaattccttccaatagttagatctaccctgcctgtactactctagggagtatgctggaggcagagggcaagggaggggtggtattaaacaagtcaattctgtgtggtatattgtttaatcagttctgtgtggtgcattcctgaagtctctaatgtgactgttgagggcctggggaaaccatgggcaaagtggatccagttagagcccattaatctttgatcattccggttttttttttttttgntccatnttngtttacattatgncttgncccncgctccccggagnacgggagtctttactct

SEQ ID NO: 258 - DNA, 2393 bp; single-stranded, linear
  immediate source library: LUNGNOT03
  immediate source clone: 1241495
gttgccgccgctgctctagctgccgtcagtcaggctgcgcccgcgtcttcagggcccagtccctcggacccatcgccgcttctagaccctactgcggtctcggatattgccgggaaaatgtctgatgaattttcgttggcagatgcactacctgaacactcccctgccaaaacctctgctgtgagcaatacaaaacctggccaacctcctcaaggctggccaggctccaacccttggaataatccgagtgctccatcttcagtgccatctggactcccaccaagtgcaacaccctccactgtgccttttggaccagcaccaacaggaatgtatccctccgtgcctcccaccggaccacctccaggacccccagcaccctttcctccttccggaccatcatgtcccccacctggtggtccttatccagccccaactgtgccgggccctggccccacagggccatatcctacaccaaatatgccctttccagagctacccagaccatatggtgcacccacagatccagctgcagctggtcctttaggtccatggggatccatgtcttctggaccttgggcgccaggaatgggagggcagtatcctacccctaatatgccatatccatctccaggcccatatcccgctcctcctcctcaggtgtacatttgtaaaccttcatgctgtaaatggaatttgttttatctctttgggatacatttgcattttagtgtacatttacgtccctgccctctttgacctggcaatatagtgttgtataatgtaaatttatttctccaaatcgagagtgattttttaaaaattttttatctttatatggtttcagaagtatgaaccagctttctttttattattgtgagatcattttgttttataacatagttgttgactgttaatatggacctgctagaatttggatcactttcaattgaagtcagggtattgtgcataatagaaagtattggactgagatatttggttaccatggaggccaatgcttttttcatcttattaaatgtgatgtgacttttttctttgtacagaagagtactgtatttttgaatagcctactcccaagtaagagcaaatctgtatgataacattttttcctctggacataagacataacagtaacacgatgtacatttacaagcggccttatgtacatttcccaacaatctttttaaggcaaaattgtgaccatatgtgtataattaaaatcgtttttaatcctttgcctatgaaaatattttggaaaaaaacttgctgtgtatattcagtttctgaaagataaagaaagtgctttgtattttgttgaagtcagtattttgtataaacatttatgttgacccacttatgttcagtgctgaaaactaaaatgaacatgctattctgtcagctgaatatggaagagatctttttttactagagatctgcagaagaaacgcaatcttctgagcacaatatggaatctaaaggttttatcacttagttgttcatattatgaacctaaaaataatggcataaagtttggggatgccaggcatactttttcatgtttggtgttgagttattttacttttctaacccaacattccttggtgagaccattaaatccaaacacttgtcaccgttccttctcatagtcactctgggtcatcagcatgtcccagtcactgcagcaatgccttgtgtttgtttcatttttttaaaacccacacaaagccgctgtctcactttttcctactttaccaacctcagagtatttcggcccgtatcgaacttttgttctcagtatcagcccatggtttcaggatcaaagctgtcatgttggagattggtaatggctttcctgtctttgtaacagttgaattcctagtcttccttcaacccttgccctcctgttggcacaggcattatctctgcaattttagaaaatgacaagtagagaatactacattgagaaactaaaccctcttcttggggtcctgatactcattcccatttgtcccagtgctgacaacccaatcttcccaatactttcaggcctgctctacaaaagtacctgttcttgtagaaattttacagtctgccattttgggtgcccaccccaatttttaccttttagtaagttggcatgaaattttggtaaaatctgaaaatcacatttcagaataaaacaattgggcaaaactacctaggctttactcttgagtgtctccttttgataggggattgtttctgggaccagtttgtctaagtcctggctcttattggttcatatgaaataatgttaacttcacttctttgtatattatgtataaattagaaaatgaaaaatgtgtgaataacattgtatgaaataaaaaaaaaaa

SEQ ID NO: 259 - DNA, 3016 bp; single-stranded, linear
  immediate source library: LUNGNOT03
  immediate source clone: 1242547
ttttcacctccaggttacagacagccccccttcagcccagcccagccaggtctcctacaccgncaccatgccattcggtaacacccacaacaagttcaagctgaattacaagcctgaggaggagtaccccgaccctcagcaaacataacaaccacatggccaaggtactgacccttgaactctacaagaagctgcgggacaaggagactccatctggcttcactgttagacgatgtcatccagacaggagtggacaacccaggtcaaccccttcatcatgaccgtgggctgcgtggctggtgatgaggagtcctacggagtttttcaaggaactgtattgaccccatcatctcggatcgccacgggggctacaaagcccactgacaagcacaagactgacctcaaccatgaaaacctcaagggtggagacgacctgggaccctaactacgtgctcagcagccgcgtccgcactggccgcagcatcaagggctacaaggttgcccccacattgttcccgttggcgagcgccgggcggtggagaagctctctgtggaagctctcaacagcctgacgggcgagttcaaagggaagtactaccctctgaagagcatgacggagaaggagcagcagcagctcatcgatgaccacttcctgttcgacaaagcccgtgtccccgctgctgctggcctcaggcatggcccgcgactggcccgacgcccgtggcatctggcacaatgacaacaagagcttcctggtgtgggtgaacgaggaggatcacctccgggtcatctccatggagaaggggggcaacatgaaggaggttttccgccgcttctgcgtagggctgcagaagatttgaggagatctttaagaaagctggccaccccttcatgtggaaccagcacctgggctacgtgctcacctgcccatccaacctgggcactgggctgcttggaggcgtgcatgtgaagctggcgcacctgagcaagcaccccaagttcgaaggagatcctcacccgactgcttttgcagaaagaggggtacaggtggcgtggacacagctgccgtgggcttcagtatttgacgtgtccaacgctgatcggctgggcctcgtccgaagttagnaacaggtgcagctggtggtggatggtgtgaagctcatggtggaaatggagaagaagttggagaaaggccagtccatcgacgacatgatccccgcccagaagtaggcgtcctgcccacctgccaccgactgctggaacccagccagtgggagggcctggcccaccagagtcctgctccctcactcctcgccccgccccctgtcccagagtcccacctgggggctctctccacccttctcagagttccagtttcaaccagagttccaaccaatgggctccatcctctggattctggccaatgaaatatctccctggcagggtcctcttcttttcccagagctccaccccaaccaggagctctagttaatggagagctcccagcacactcggagcttgtgctttgtctccacgcaaagcgataaataaaagcattggtggccttaaaaaaaaaaaaaactcgagccgcgctccgggagctgccgacggacggagcgcccccgcccccgcccggccgcccgcccgccgccgccatgcccttctccaacagccacaacgcactgaagctgcgcttcccggccgaggacgagttccccgacctgagcgcccacaaacaaccacatggccaaggtgctgacccccgagactgtacgcggagctgacgcgccaagagcacgccgagcggcttcacgctggacgacgtcatccagacaggcgtggaaaaacccgggccacccgttacatcatgaccgtgggctgcgtggcgggcgacgaggagtcctacgaagtgttcaaggatctcttcgaccccatcatcgaggaccggcacggcggctacaagcccagcgatgagcacaagaccgacctcaaccccgacaacctgcagggcggcgacgacctggaccccaactacgtgctgagctcgcgggtgcgcacgggccgcagcatccgtggcttctgcctccccccgcactgcagccgcggggagcggccgagccatcgagaagctcgcggtggaagccctgtccagcctggacggcgacctggcgggccgatactatgccgctcaagagcatgacggaggcggagcagcagcagctcatcgacgaccacttcctcttcgacaagcccgtgtcgcccctgctgctggcctcgggcatggcccgcgactggcccgacgcccgcggtatctggcacaatgacaataagaccttcctggtgtgggtcaacgaggaggaccacctgcgggtcatcttccatgcagaagggggggaacatgaaggaggtgttcacccgcttctgcaccggcctcacccagattgaaactctcttcaagtctgaaggactatgaagttcatgtggnaaccctcacctgggctacatcctcacctgcccatccaacctgggcaccggggctgcgggcaggtgtgcatatcaagctgcccaacctgggcaagcatgagaagttctcggaggtgctttaagcggctgcgacttcagaagcgaggcacaggcggtgtggacacggctgcggtgggcggggtcttcgacgtctccaacgctgaccgcctgggctttctcagaggtggagctggtgcagatggtggtgggacggagtgaagctgctcatcgagatggagcagcggctgggagcagggccaggccatcgacgacctcatgcctgcccagaaatgaagcccggcccacacccgacaccagccctgctgcttcctaacttattgcctgggcagtgcccaccatgcacccctgatgttcgccgtctggcgagcccttagccttgctgtagagacttccgtcacccttggtagagtttatttttttgatggctaagatactgctgatgctgaaataaactagggttttggcctgcctg

SEQ ID NO: 260 - DNA, 1023 bp; single-stranded, linear
  immediate source library: LUNGNOT03
  immediate source clone: 1243040
gaaccctttgcatgttgcctgcctagaattgaaaagtacaggacattcctctgctcctattgcccctgtttccgttcttttcacactgtctgtgggtgctgtgccctgttggaactctctttaacgtcttacgttggagccgctaaccttccccaggtgtttgtcttcattgctttcacagggaaagaattactcgtcccactgacgagttctatgtatgtccctgggaagctgcatgatgtggaacacgtgctcatcgatgtgggaactgggtactatgtagagaagacagctgaggatgccaaggacttcttcaagaggaagatagattttctaaccaagcagatggagaaaatccaaccagctcttcaggagaagcacgncatgaaacaggccgtcatggaaatgatgagtcagaaggttnagcagttacagccctgggggcagcttaggtacttgnttaaggccnagagtttttncaagaaattgggcaggacccacgcgtccgccacacgcgtccgttcgttaagtcggccttcccaacatggcgcagtctattaacatcacggagctgaatctgccgcagctagaaatgctcaagaaccagctggaccagatgtatgtccctgggaagctgcatgatgtggaacacgtgctcatcgatgtgggaactgggtactatgtagagaagacagctgaggatgccaaggacttcttcaagaggaagatagattttctaaccaagcagatggagaaaatccaaccagctcttcaggagaagcacgccatgaaacaggccgtcatggaaaatgatgagtcagaagattcagcagctcacagccctgggggcagctcaggctacttctaaggcctgagagttttgcagaaatggggcagagggacacctttgggcgtggcttnctggtgatgggaagggtttgtgttttaatgncaataaatntnccagtnggcaaaaaaaaaaaaaannnnnnnnnnnaaaaaaaggggggccgttttggnggt

SEQ ID NO: 261 - DNA, 351 bp; single-stranded, linear
  immediate source library: MENITUT03
  immediate source clone: 1256257
gaatgcaactatgagcgctggcacaagcagcggagagtcatagacctggccttcagccggagctccttggttagcttaatggaaacattcaacgagaaggctgagcagctggtggagattctagaagccaaggcagatgggcagaccccagtgtccatgcaggacatgctgacctacaccgccatggacatcctggccaaggcagcttttgggatggagaccagtatgctgctgggtgcccagaagcctctgtcccaggcagtgaaacttatgttggagggaatcantgcgtcccgcaacactctggcaaagttcctgccagggaagaggaagcagctccgggaggtccgg

SEQ ID NO: 262 - DNA, 2160 bp; single-stranded, linear
  immediate source library: MENITUT03
  immediate source clone: 1257695
attcactttataaaataagggtgtgtaacatatcaagatacatttatttttatctgttttttttttcctgttaaagacaattatgtagagtgggcacgtaatccctccttagtagtattgtgttttgtgtaaatgtgctattgatattaagtatttacatgttccaaatatttacagactctagttgcaaggtaaagggcagcttgtgatctcaaaaaaatacatggtgaaatgtcatccagttccatgaccttatattggcagcagtaggaaattggcagaagtgttgggttgtggtaacggagtgatgaatttttttttaatggccttgagtttgatctctgcaaaggataggaaacctttaggaagacaagaaactgcagttaatttagaactgtcactgtttcaagttacactttaaaaccacagcttttaccatcataacatggctctggtaatatgtaggaagctttataaaagttttggttgattcagaaaaaggatcctgttgcagagtgagaggaagcatagggggaaactccattggaacagattttcacacaacgttttaaattgatataagtttaggcagttgtagttcataacttatgttgctcatgttgtgctgtgtcaggatgggataggaagcaagtcccatgcttagaggcatgggatgtgttggaacgggatttacacacactggaggagcagggcaagttggaattctaagatccatgaacccccaactgtatttcctcccttgcatattttaccaatatattaaaaaacaatgtaacttttaaaaggcatcattcctgaggtttgtcttaatttctgattaagtaatcagaatattttctgctgtttttgccaggaatcacaaagatgattaaagggttggaaaaaaagatctatgatggaaaattaaaggaactgggattattgagcctggagaagagaagactgaggggcaaaccattgatggttttcaagtatatgaagggttggcacagagagggtggcgaccagctgttctccatatgcactaagaatagaacaagaggaaactggcttagactagagtataagggagcatttcttggcaggggccattgttagaatacttcataaaaaaagaagtgtgaaaannnnnnnnnnnnnnnnnnnnnnnaaaaaattagataaaaatttgtctatttaagatggttaaagatgttcttacccaaggaaaagtaacaaattatagaatttcccaaaagatgttttgatcctactagtagtatgcagtgaaaatctttagaactaaataatttggacaaggcttaatttaggcatttccctcttgacctcctaatggagagggattgaaaggggaagagcccaccaaatgctgagctcactgaaatatctctcccttatggcaatcctagcagtattaaagaaaaaaggaaactatttattccaaatgagagtatgatgtgacagatattttagtatctcagtaatgtcctagtgtggcggtggttttcaatgtttcttacatggtaaaggtataagcctttcatttgttcaatggatgatgtttcagatttttttttttttaagagatccttcaaggaacacagttcagagagattttcatcgggtgcattctctctgcttcgtgtgtgacaagttatcttggctgctgagaaagagtgccctgccccacaccggcagacctttccttcacctcatcagtatgattcagtttctcttatcaattggactctcccaggttccacagaacagtaatattttttgaacaataggtacaataggaaggtcttctgtcatttaacctggtaaaggcagggctggagggggaaaataaatcattaagcctttgagtaacggcagaatatatggctgtagatccatttttaatggttcatttcctttatggtcatataactgcacagctgaagatgaaaggggaaaataaatgaaaattttacttttcgatgccaatgatacattgcactaaactgatggaagaagttatccaaagtactgtataacatcttgtttattatttaatgttttctaaaataaaaaatgttagtggttttccaaatggcctaataaaaacaattatttgtaaataaaaacactgttagt

SEQ ID NO: 263 - DNA, 1704 bp; single-stranded, linear
  immediate source library: MENITUT03
  immediate source clone: 1257906
ctcgacttagccagcctgggcagctgatgtctcagccctccacggcctncaacagcttacctgagccagccaagaagagtgaagaactggtggctgaagcacataacctctgcaccctgctagaaaatgccatacaggacactgtgagggaacaagaccagagtttcacggccctagactggagctggttacagacggaagaagaagagcacagctgcctggagcaggcctcatgatgtggggggactcgaccccctgacatggggcagcccatagcaggccttgtgcggtggggggactcgaccccctgacatggggctgcctggagcaggccgcgtgacgtggggctgcctggccgcggctctcacatggtggttcctgctgcactgatggcccaggggtctctggtatccagatggagctctcgcttcctcagcagctgtgactttcacccaggacccaggacgcagccctccgtgggcactgccggcgccttgtctgcacactggaggtcctccattacagaagcccagcgcacatcgctggccccacaaacgttcaggggtacagccatggcagctccttcctctgccgtgagaaaagtgcttggagtacggtttgccacacacgtgactggacagtgtccaattcaaatctttcagggcagagtccgagcagcgcttggtgacagcctgtcctctcctgctctccaaaggccctgctccctgtcctctctcactttacagcttgtgtttcttctggattcagcttctcctaaacagacagtttaattatagttgcggcctggccccatcctcacttcctctttttatttcactgctgctaaaattgtgtttttacctactactttggtggttgtcctcttttcggcaaagttggagcgagtgccaagctctccatctgtggtcctttctgccaagagcgactcatagtaaccaggatgggagagcagctgccttattctgaatcccaaaaattacttgggggtgattgtcacagaggagggacagaaagggtatctgctgaccaccagcctgcctacccatgcccatgtctccattcctgctcaagcgtgtgtgctgggccggggagtccctgtctctcacagcatctagcagtattattaaatggattcattttaaaaatagctcctatattttgtaacatgtctcaaacactcatactgggttccacaatccactgttagaatacctatggttagggcttctgaactaaaataatggaaaattttaacaatttgtatagtgcctggatcattactagtgccataaccctgcttcttcaacatttcacagaacttctcttttatataaaggcaagagcacaaaatgagttcagatgatcacaaacaggtgagttttgttggagaagaaagttggagtaggagactttcacaagtggtttccatggagatagaatgaagcattctgtggtcaagtaagtttagggagctattcatgtttcacttgctttgtggagattcacactatgcactgggaaagtatctgaaaagtcttataataaagaaacaggcttaactttgtgtaagaacactgtttatcaatgtcatttggctntagaaacattttctcctgctgattgtgtgtgtgaaacatgtattaacattccaatgaactagcatttaataaagcacaattttgg

SEQ ID NO: 264 - DNA, 759 bp; single-stranded, linear
  immediate source library: MENITUT03
  immediate source clone: 1260257
gtccaaacttttccattttagattcctttatagacacgtcagcctaaaaatcagcctattcgggtgttcttttgaatatctcctggcatttttgtatctaactttgttcaatctgggaatttcagttttcaatatccttgaaaatggcttaagtgataacttccgtttcagttaaaaggaagcccgaagttgtgtttgtgctgcccacaggacagtgggagttacagttcatatcaggatgaccctacatacccaggtcagattgacgggaccagaagggaacatcgacttctaatccagctttcttgtttaattatgacctaaatctaatttacttccactgaaccatccaagacctctggcaggcagggaaatgggcagtgatgcaaaaaagggagactctttggagcttttatgaatagttcatggtgaggacagaacttttctactttcagacagactgcttgctagttttatgnnttcagcacacgaattatgctgtgttgctcacattcaaaccaaaccaacgactatgtttaatgaactcagtattcaaatttattatatatgcgtatatatgtatatatggatcccttatatttagatttaactcgtagttttatttgaaagtagaaaagaactctacaaaaacgggaagaatgtgtctttcttcccttcttgacttctaataggtgtcattgaaatgtaaaatctaagtatgaaattatgaaaggacattctttaattactgcccactca

SEQ ID NO: 265 - DNA, 1539 bp; single-stranded, linear
  immediate source library: SYNORAT05
  immediate source clone: 1261161
gaacaagatggattatcaagtgtcaagtccaatctatgacatcaattattatatatcggagccctgccaaaaaaatcaatgtgaagcaaatcgcagcccgcctcctgcctccgctctactcactggtgttcatctttggttttgtgggcaacatgctggtcatcctcatcctgataaactgcaaaaggctgaagagcatgactgacatctacctgctcaacctggccatctctgacctgtttttccttcttactgtccccttctgggctcactatgctgccgcccagtgggactttggaaatacaatgtgtcaactcttgacagggctctattttataggcttcttctctggaatcttcttcatcatcctcctgacaatcgataggtacctggctgtcgtccatgctgtgtttgctttaaaagccaggacggtcacctttggggtggtgacaagtgtgatcacttgggtggtggctgtgtttgcgtctctcccaggaatcatctttaccagatctcaaaaagaaggtcttcattacacctgcagctctcattttcatacattaaagatagtcatcttggggctggtcctgccgctgcttgtcatggtcatctgctactcgggaatcctaaaaactctgcttcggtgtcgaaatgagaagaagaggcacagggctgtgaggcttatcttcaccatcatgattgtttattttctcttctgggctccctacaacattgtccttctcctgaacaccttccaggaattctttggcctgaataattgcagtagctctaacaggttggaccaagctatgcaggtgacagagactcttgggatgacgcactgctgcatcaaccccatcatctatgcctttgtcggggagaagttcagaaactacctcttagtcttcttccaaaagcacattgccaaacgcttctgcaaatgctgttctattttccagcaagaggctcccgagcgagcaagctcagtttacacccgatccactggggagcaggaaatatctgtgggcttgtgacacggactcaagtgggctggtgacccagtcagagttgtgcacatggcttagttttcatacacagcctgggctgggggtggggtgggagagtcttttttaaaaggaagttactgttatagagggtctaagattcatccatttatttggcatctgtttaaagtagattagatcttttaagcccatcaattatagaaagccaaatcaaaatatgttgatgaaaaatagcaacctttttatctccccttcacatgcatcaagttattgacaaactctcccttcactccgaaagttccttatgtatatttaaaagaaagcctcagagaattgctgattcttgagtttagtgatctgaacagaaataccaaaattatttcagaaatgtacaactttttacctagtacaaggcaacatataggttgtaaatgtgtttaaaacaggtctttgtcttgctatggggagaaaagacatgaatatgattagtaaagaaacgacacttttcatgtgt

SEQ ID NO: 266 - DNA, 1467 bp; single-stranded, linear
  immediate source library: BRAINOT09
  immediate source clone: 1265680
gataaatagaaagcagaatgaattaatggaaaagaactcggctgttaggccattctctaaattctagtttagccaaaagtttatgtgtggtttggggcttcatttatttatctcatgagtaaaatgggataatacctaacaggcaggctctggaagttggaaatcccggccccgctgcgggcggcgaggcccccaaagctgctgaggccgccgcggccccggccgagagcncggcccctgccgccggggaggagcccagcaaggaggaaggggaacccaaaaagactgaggcgcccgcagctcctgccgcccaggagaccaaaagtgacggggccccagcttcagactcaaaacccggcagctcgagaggctgccccctcttccaaggagacccccgcagccacggaagcgcctagttccacacccaaggcccagggccccgcagcctctgcagaagagcccaagccggtggaggccccggcagctaattccgaccaaaccgtaaccgtgaaagagtgacaaggacagcctataggaaaaacaataccacttaaaacaatctcctnnnnnnnnnnnnnnnnnnnnnnnnnnnnnnnnnnnnatntgctntntctctctcctctcctatctctcctctctctctctcctatactaacttgtttcaaattgggaagtaatgatatgtattgcccaaggaaaaataccaggatgttgtccccatcaagggagggaggggggtggggaggaattccaaatagtatttttgtgggggaaatatctaatataccttccagtcaactttaccaagaagtcctggatttccaagatccgcgtctgaaagtgcagtacaatcgtttgtaccctgaaaactgccgccacatgcactcctccaccgctgagagttgaatagcttttcttctgcaatgggagttgggagtgatgcgtttgattctgcccacagggcctgtgccaaggcaatcagatctttatgagagcagtattttctgtgttttctttttaatttacagcctttcttattttgatatttttttaatgttgtggatgaatgccagctttcagacagagcccacttagcttgtccacatggatctcaatgccaatcctccattcttcctctccagatatttttgggagtgacaaacattctctcatcctacttagcctacctagatttctcatgacgagttaatgcatgtccgtggttgggtgcacctgtagttctgtttattggtcagtggaaatgaataaaaattaaaaaaaaagtctgcgttcattgcagttccagtttctcttccattctgtgtcacagacaccaacacaccactcattggaaaatggaaaaaaaaaacaaaaaaaaaacaaaaaaatgtacaatggatgcattgaaattatatgtaattgtataaatggtgcaacagtaataaagttaaacaattaaaaagaagt

SEQ ID NO: 267 - DNA, 509 bp; single-stranded, linear
  immediate source library: LUNGNOT01
  immediate source clone: 126758
gaattcgtggaaccactggcttggtggattttgctagatttttctgatttttaaactcctgaaaaatatcccagataactgtcatgaagctggtaactatcttcctgctggtgaccatcagcctttgtagttactctgctactgccttcctcatcaacaaagtgccccttcctgttgacaagttggcacctttacctctggacaaacattcttccctttatggatccattaaagcttcttctgaaaactctgggcatttctgttgagcaccttgtggaggggctaaggaagtgtgtaaatgagctgggaccagaggcttctgaagctgtgaagaaactgctggaggcgctatcacacttggtgtgacatcaagataaagagcggaggtggatggggatggaagatgatgctcctatcctccctgcctgaaacctgttctaccaattatagatcaaatgccctaaaatgtagtgacccgtgaaaaggacaaataaagcaatgaatacatt

SEQ ID NO: 268 - DNA, 1390 bp; single-stranded, linear
  immediate source library: BRAINOT09
  immediate source clone: 1268703
gtaaatactgtaacantgtataacattaaaaatgttaaagaactgcttagtattaggaagcagatcattcccaaaattctaaggggcagcagcatatgttgttgcttgtataaagcctagcgataatttttagactaactttccaggtgccctgttggcaattagcactacccatgtaccctgctgtataataaacaatcttagacatttntcaactgttgatacaaatgttagtcctaaaccacttnttatatatgtttgttacgacaagtcagcaatggccatatagcatattttcctgcaatgaaagcgtttgtgaacttacctacagaaaatgaattaacattcaatgcagaggaatattctgacatatcagaaatgaggtcatatcagaactactaggcccatatggtatgaagtttctaagtgaaagccttatgtggcatatttcatcacaagttgctgaacttaagaaacttgtggtggagaatgttgatgtgttaacacaaatgaggaccagctttgacaaaccagaccagatggctgcactgtttaaaagattatcatctgttgacagtgtcttgaagaggatgacaataattggtgtaattttatccttccgatcattggcacaagaagcacttagagatgtgttatcctaccacattccttttcttgtaagttcaattgaagattttaaggatcacattccaagggaaactgatatgaaggttgcaatgaatgtgtatgagttatcatcagctgccggattaccttgtgagattgatcctgcattggtcgtagctctttcttcacaaaaatcggaaaacattagtccagaagaagagtataaaattgcctgccttctcatggtgtttgtggcagtttctttgccaacactggccagtaatgtgatgtctcagtacagccctgctatagaagggcattgcaacaacatacattgcttggccaaagccatcaaccagattgctgcagctttgtttacaattcacaaaggaagcattgaagaccgtcttaaagaatttctggcgcttgcatcctccagtctactgaaaattggccaggagacagataaaactacaacaagaaatagagaatctgtttatttactgctagatatgattgtacaagaatctccattccttacaatggatcttttggaatcttgttttcccttatgtcttgctgagaaatgcataccatgctgtctacaaacaaaagtgttacaatcttctgcataaattacctacttaaatcaaggtnaaggacggatttttgttgccttggggttttaccctgtaggactttggggaccttattttacctttaagnccccgaaaaaaggtttttgtggggtttataaaatttc

SEQ ID NO: 269 - DNA, 263 bp; single-stranded, linear
  immediate source library: TESTTUT02
  immediate source clone: 1271822
gacatttcgatctaagtggtcataaaccagataggtagttttattaaaagatttaccctaagaacactccttctattcccatttctgacatcctacccacacccacattcatcgactaccatgtcttcataatgtcgtagaatgacattgtcattattgtcctggtagagcatggaaatgggagacagcttggtggggatacttacagcctgggggatctctgggtcaacggcatgcatcagggcttgcatgaaagcataatt

SEQ ID NO: 270 - DNA, 732 bp; single-stranded, linear
  immediate source library: TESTTUT02
  immediate source clone: 1274145
gtggagctctccccggtctgacagccactccagaggccatgcttcgtttcttgccagatttggctttcagcttcctgttaattctggctttgggccaggcagtccaatttcaagaatatgtctttctccaatttctgggcttagataaggcgccttcaccccagaagttccaacctgtgccttatatcttgaagaaaattttccaggatcgcgaggcagcagcgaccactggggtctcccgagacttatgctacgtaaaggagctgggcgtccgcgggaatgtacttcgctttctcccagaccaaggtttctttctttacccaaagaaaatttcccaagcttcctcctgcctgcagaagctcctctactttaacctgtctgccatcaaagaaagggaacagttgacattggcccagctgggctggacttggggcccaattcttactataacctgggaccagagctggaactggctctgttcctggttcaggagcctnatgtgtggggccagaccacccctaagccaggtaaaatgtttgtgttgcggtcagtcccatggccacaaggtgctgttcacttcaacctgctggatgtagctaaggattggaatgacaacccccggaaaaatttcgggttattcctggagatactggtcaaagaagatagagactcaggggtgaattttcagcctgaagacacctgtgccagactaagatgctcccttcatgcttc

SEQ ID NO: 271 - DNA, 944 bp; single-stranded, linear
  immediate source library: BRAINOT11
  immediate source clone: 1286844
cggctccgagccttcgccggcgtcccgacccgaggccggacccgaggccagtcccgccgctgcgcancgaagccagtgcggggcctgagagggacgcgcgccccggggcccccgccgcgggcaccatgggcgctgcccactccgcgtctgaggaggtgcgggagctcgagggcaagaccggcttctcatcggatcagatcgagcagctccatcggagatttaagcagctgagtggagatcagcctaccattcgcaaggagaacttcaacaatgtcccggacctggagctcaaccccatccgatccaaaattgttcgtgccttcttcgacaacaggaacctgcgcaagggacccagtggcctggctgatgagatcaatttcgaggacttcctgaccatcatgtcctacttccggcccatcgacaccaccatggacgaggaacaggtggagctgtcccggaaggagaagctgagatttctgttccacatgtacgactcggacagcgacggccgcatcactctggaagaatatcgaaatgtggtcgaggagctgctgtcgggaaaccctcacatcgagaaggagtccgctcgctccatcgccgacggggccatgatggaggcggccagcgtgtgcatggggcagatggagcctgatcaggtgtacgaggggatcaccttcgaggacttcctgaagatctggcaggggatcgacattgagaccaggatgcacgtccgcttccttaacatggaaaccatggccctttgccactgacccaccgccacctccgcggagaaactgcactttgcaatggggccgccttcccgcgtagtggagcagcccaggcccgacggacagctatttcctgcagcgccggtacatagccaaggctngtctngaacttntgtcttgtagggattggaatntngncctccctgtttttanttc

SEQ ID NO: 272 - DNA, 615 bp; single-stranded, linear
  immediate source library: BRAINOT11
  immediate source clone: 1291208
atgaggctctccaggagaccagagacctttctgctggcctttgtgttgctctgcaccctcctgggtcttgggtgcccactacactgcgaaatatgtacggcggcggggagcaggtgccatggccaaatgaagacctgcagcagtgacaaggacacatgtgtgctcctggtcgggaaggctacttcaaagggcaaggagttggtgcacacctacaagggctgcatcaggtcccaggactgctactccggcgttatatccaccaccatgggccccaaggaccacatggtaaccagctccttctgctgccagagcgacggctgcaacagtgcctttttgtctgttcccttgaccaatcttactgagaatggcctgatgtgccccgcctgcactgcgagcttcagggacaaatgcatggggcccatgacccactgtactggaaaggaaaaccactgcgtctccttatctggacacgtgcaggctggtattttcaaacccagatttgctatgcggggctgtgctacagagagtatgtgctttaccaagcctggtgctgaagtacccacaggcaccaatgtcctcttcctccatcatatagagtgcactcactccccctga

SEQ ID NO: 273 - DNA, 3144 bp; single-stranded, linear
  immediate source library: PGANNOT03
  immediate source clone: 1292521
acggctgggaccccacctgcatgatgggacacgagtggatccggaacatgaacgtccacagcctgccgcacggccaccaccagcctttctataacgtgctggtggaggacggctcctgtcgatacgcagcccaagaaaacttggaatataacgtggagcctcaagaaatctcacaccctgacgtgggacgctatttctcagagtttactggcactcactacatcccaaacgcagagctggagatccggtatccagaagatctggagtttgtctatgaaacggtgcagaatatttacagtgcaaagaaagagaacatagatgagtaaagtctagagaggacattgcacctttgctgctgctgctatcttccaagagaacgggactccggaagaagacgtctccacggagccctcgggaacctgctgcaccagggaaagccactccaccagtagtgctggttgcctcctactaagtttaaataccgtttgctcttccccagctgcaaagacaatgttgctctccgcctacactagtgaagtantctgaaaggcactgtgtcagtgggcatggcttgtatgcttgtcctgtggtgacagtttgtgacattctgtcttcatgaggtctcacagtcgacgctcctgtaatcattctttgtattcactccattcccctgtctgtctgcatttgtctcagaacatttccttggctggacagatggggttatgcatttgcaataatttccttctgatttctctgtggaacgtgttcggtcccgagtgaggactgtgtgtctttttaccctgaagttagttgcatattcagaggtaaagttgtgtgctatcttggcagcatcttagagatggagacattaacaagctaatggtaattagaatcatttgantttatttttttctaatatgtgaaacacagatttcaagtgttttatcttttttttttaaatttaaatgggaatataacacagttttcccttccatattcctctcttgagtttatgcacatctctataaatcattagttttctattttattacataaaattcttttagaaaatgcaaatagtgaactttgtgaatggatttttccatactcatctacaattcctccattttaaatgactacttttattttttaatttaaaaaatctacttcagtatcatgagtaggtcttacatcagtgatgggttctttttgtagtgagacatacaaatctgatgttaatgtttgctcttagaagtcatactccatggtcttcaaagaccaaaaaatgaggttttgcttttgtaatcaggaaaaaaaaaaattaatgaaccttnnnnnnnnnnnnnnnggttttgaagggaaaaaaaagtggtttcacacctcttgttattccttagagtcacttcaaggcctgtttgaatgtggcaggttagaaagagagagaatgtctttcatttgaagagtgttggacttgtgtgaaaggagatgtgcgtgttggaatctgcttttccaagccgccagggtcctgacggcagcaggacgaagcctgttgtggcgtcttctgggaaagcctgaccgtgtgttcggacggcactggctcctttccgaagttctcagtaactgagcccagagtaactgcacgcctttgtgcagctctggagctccaccaactctcggcctgccagttctcaagcgagctaatcttgtcattaatcgatagaagctaacttccgaagttaggacctagttactttgctctcaacatttaaaataatgcagttgctctagtgaatggggcgttaggggcctgtctctgcacctgtctgtccatctgcatgcagtattctcacccatgttgaatgcctgctgcttgtttaccctttggaaaccctggggtgaccaaggtttggaaagccacctgagaccacttcatagcaagggaaggctttaagcagttactagaaagagatggggatttggcccctggctcctccagcctgaatgagctatttaatccactgtccatgttcctcatcagtcaaatccaaagtcaaaggatttgaacctgcatctggaaacgtaaccactcacagcacctggcccgccaaggttgggaggattgtacactactttcatttaaaggggaaagtttgataatacggaattaattaatatgaatgagatgcattaataagaacctgagcatgctgagagttgcaattgagtgttttctggtttgattgatttccttttttcttagacacatcaaagtcaagaaagatggttttacctttactgacccagctgtacatatgtatctagactgtttttaaatgtctttcttcatgaatgcttcatggggctccaggaagcctgtatcacctgtgtaagttggtatttgggcactttatatttttctaaaaacgtgttttggatcctgtactctaataaatcataagtttctttttaaaaattttccaaaacttttctccattttaaaaagccctgttataaacgttgaactttcacaatgttaaaatgttaaatatttggatatagcaacttcttttctcttcaaatgaatgccaagatttttttgtacaatgattaataaatggaacttatnccagagaaanccaggaaattggcctgcccaatttngtttgaggacagaaagcccagccatgacttgagtagaatgtctctcacctctnttcggatctaaatatgaaaagtatgttctgctgaatttttctgagcattggtgagcggacagcctacctgtaaaccatgacctccttgccaaacgttaattttatcagctcactagtaacctttgagaattatctggttgtcatgcaaagattgcactttctgaattatgttaaaacacatgttgtaaaatgagaactgctcatgctttganagaaaaccaggttnttcgngcgttctgntgccgntgatttgaatggctgtgctgtatacgatgtgtccagaatgtcttcagagnnnngtttccgtgtnatgttactacctactatgtgggaggaaaaaaggttataggtanacaaagtcaattgactctatggnggtgtttctcaatacctngacgcacagtactgtncgtcgtggacttttaagaga

SEQ ID NO: 274 - DNA, 1534 bp; single-stranded, linear
  immediate source library: BRSTNOT07
  immediate source clone: 1298861
agaggctcctggattatagcctgcacaaggagaggaccggcagcaatcgatttgccaaggttggattcgggattgtccttcatccgctctggggtcaggcctgcatgtatcttagtgtgtctgctggtgtgagtgtgatttgaagatgaccacctgggatcttccttcattgcctcttcccattctttgattgccgtttgtgctcctcccctcttgagtggcctcatttttcaggcacatgcatgagggtctgggcctgttcatgagggtcctgcttcaatctcagacaccttccagcacctgcgcgcctgaatccgtcccacccaggcccagacgcaggcttcttctcctcgggtcttggtcctgcatcctctctctcccagagcctccgttagggggtgggaaaggactttgccataggtcgctgaggccaccatctgctctcttactggccaagggcgtaaaaagatagtcctcccattagctagagagcaaaccccagaaagcctattggctgcgccgtccgcgggccttggtccgctttgaaggcgggctgcggctgcgagaggagggcgggcgggaggctagctgttgtcgtggttgctcggaggcacgtgtgcagtcccggaagcggcgaggggaaactgctccgcgcgcgccgcgggaggaggaaccgcccggtcctttagggtccgggcccggccgggccatggattcaatgcctgagcccgcgtcccgctgtcttctgcttcttcccttgctgctnatgcannnnnnnnnnnnnnnnngccccggagctgggcccgagccaggccggagctgaggagaacgactgggttcgcctgcccagcaaatgcgaagtgtgtaaatatgttgctgtggagctgtaagtcagcctttgaggaaaccggcaagaccaaggaggtgattggcacgggctatggcatcctggaccagaaggcctctggagtcaaatacaccaagtcggacttgcggttaatcgaagtcactgagaccatttgcaagaggctcctggattatagcctgcacaaggagaggaccggcagcaatcgatttgccaagggcatgtcagagacctttgagacattacacaacctggtacacaaaggggtcaaggtggtgatggacatcccctatgagctgtggaacgagacttctgcagaggtggctgacctcaagaagcagtgtgatgtgctggtggaagagtttgaggaggtgatcgaggactggtacaggaaccaccaggaggaagacctggactggaattnccttctggcggcgcaaaccaacgtngcttgaaagggggaaaaaagaacaaccaagttttgcccttgngncaagaaggcaagttggggttcccgggncnaaaggacagngggnaggaaccaccaagncttggcccccttgngnggagnggggaaaggaaangttcnccaaaggaaaaggaaaggaaggccaagccaaggggggccccaaaggggccaaggccaggggncggggtcaaggggaagtt

SEQ ID NO: 275 - DNA, 324 bp; single-stranded, linear
  immediate source library: BRSTNOT07
  immediate source clone: 1299537
gattgcttgaccagatggggcacttttgtgattcccctgcttgtgactgcacaccgggaccccactcaattcaaagacccagactgcttcaaccctaccaacttcctggacaagggcaagttccagggcaatgatgctttcatgccctttgcctcaggtgcaggcagaggaggaaggggaccagcctggactggctctggggtacctggtgctcactgtgcacctgtgtacccggcaaagcagatgtgcctgggcacaggcctggcccactcgggtatcttcctattccttacggccactttacagaggttttgcctgtccctg

SEQ ID NO: 276 - DNA, 687 bp; single-stranded, linear
  immediate source library: PLACNOT02
  immediate source clone: 1302907
ggtcagggtcccggagccggtgccctcacaggccaatagggaagccgagggctgttttgttttaaattagtccgtcgattacttcacttgaaattctgctcttcaccaagaaaacccaaacaggacacttttgaaaacaggactcagcatcgctttcaataggcttttcaggaccttcactgcattaaaacaatatttttgaaaatttagtacagtttagaaagagcacttattttgtttatatccattttttcttactaaattatagggattaactttgacaaatcatgctgctgtttattttctacatttgtattttatccatagcacttattcacatttaggaaaagacataaaaactgaagaacattgatgagaaatctctgtgcaataatgtaaaaaaaaaaaaagataacactctgctcaatgtcacggagaccattttatccacacaatggtttttgttttttattttttcccatgtttcaaaattgtgatataatgatataatgttaaaagctgctttttttggctttttgcatatctagtataataggaagtgtgagcaaggtgatgatgtggctgtgatttccgacgnctggtgtgtggagagtactgcatgagcagagttcttctattataaaatnaccatatcttgccattcacagnaggtccngtggaatacgg

SEQ ID NO: 277 - DNA, 768 bp; single-stranded, linear
  immediate source library: PLACNOT02
  immediate source clone: 1303190
ggctttaatcagaactgtggaaatgcttcagatttagccccccagaagcagaggaccaagccattgattccagaaatgtgcttcacttcgactggctgcagcacggacatcaacctttctactccttatcttgaggaggatggcaccagcatactcgtttcctgcaagaagtgcagcgtccgggtccatgccagttgctatggggtcccccctgcaaaggcttctgaagactggatgtgttctcggtgttcagccaatgccctagaggaggactgctgtttatgctcattacgaggaggggccctgcagagagcaaatgatgacaggtgggtccacgtttcatgtgctgtggcaattctggaagcaaggtttgtcaacattgcagaaagaagtccggtggatgtgagcaaaatccccctgccccgnttcaaactgaaatgtatcttctgtaagaagcggaggaaaagaactgctggctgctgtgtgcagtgtttctcacggcccgctgcccaactgccttccatgtgagctgcgcccaggctgccggtgtgatgatgcagcctgacgactggccttttgtggtcttcattacctgctttcggcaacaagattcctaatttggaggtgagagagggtgtcattctagaatcctcttgacagttttcatggtcattttctctgcatgttttccatttgttgtatcagcaactatttcctcaagcattctgcattatgaagagtgctaatgggttaagagattgagaggtg

SEQ ID NO: 278 - DNA, 5409 bp; single-stranded, linear
  immediate source library: PLACNOT02
  immediate source clone: 1305494
gattggcttttctgaaacagccaaatgtcaggccatgaagaagatctttgatgatgcgtacaaatcccagctcagttgtgtggttgtggatgacattgagagattgcttgattacgtccctattggccctcgattttcaaatcttgtattacaggctcttctcgttttactgaaaaaggcacctcctcagggccgcaagcttcttatcattgggaccactagccgcaaagatgtccttcaggagatggaaatgcttaacgctttcagcaccaccatccacgtgcccaacattgccacaggagagcagctgttggaagctttggagcttttgggcaacttcaaggataaggaacgcaccacaattgcacagcaagtcaaagggaagaaagtctggataggaatcaagaagttactaatgctgatcgagatgtccctacagatggatcctgaataccgtgtgagaaaattcttggccctcttaagagaagaaggagctagcccccttgattttgattgaaaatgaactatttgaaacacacagtgaccaagggaagtgaccaaggtgaagatggcctaggatcttcactgtcttactcaagatactggactaagtggaacgttctctaccttcaacatgtgctcgctctgcatgattagtgcaataaaactcccttccttatgcatactgagatagcttagtgtctcgtggaaggtgtcaatttggtttagaatgctgcgcttaccttcccatgcaggctaaagtgattccttcttgctcagtccctctgggtgggaaccatccagtacttgtggacactacacgtttcaacctctctactagcaccatcacccttgaaaactctcagtcagtgtcatgaatgttgcatgacaacagttggccgattagaaggcagactttctacatgcaaatctggcttagtaaatcgaggtgtgggccagagatcctctgacagctgtcctgagctaacactaaaagtcactgggtatttggttaaaggtctcccacaagactggtattctctttgcctgaagaaacaaggcattgaatctctaaaatgctgttctcaatcattgtcagagatgttttcaagttgcagtcagaagatctttcttaatagaaagtcagatgactaccgtgttggttgtgacttccccttaagtataactaatttgctctgtggtaagagatatgctcattattaccacttagaagatgttgttaaaaacatgtgaaagataggtatggaaaaagcatacacccccaaacagaaaggagttattaaagtaatttacaaacctctcagcactaattagtgtccaactccaagtgggtcaattccttagtataatattaaggcttactagtatcactgctttttccttagcttaatgacttacttagaatttatcctttattttaaatgatctgtactatctagtgtctaaaacactattctccagaaaaatcaatcattttctagccctctccctcagtcctttattgtccattccaatacattgaacacatttcctttaccctccacacacttcttccaaaaggaagcacccgttgagtccttttgagggtgatttgtcttacaactgactgacttagcaggaatttaattagtgaaacacaanacaaggnngatgagacttatggagtgtgcctctctctcccaactgctgcttaaaatgcaaggacaagcaattagaagccatcctaaggtgcttacctcacacgccacccatgaggcttgtggccacagtggcacttgggtgtggctcctctgttatttgtcctcatgtgagaaagcagatcatctccaaatcttgccatttgtatacttttggtggagacttggatgtcatatcttctttgttttgggttttcttccctagcttattttgtggcttttaaagaagtggattgtattgtgagatcctgtgattcctggtggccagtatcctggattcctctaagatcttgcctctttcctcctcatgaaagcagcacacattgtgttaacttatgtctcttgttaaatgagcttaatgtctttgtgttttgtccaaaactgtattgaaaaaatattgtttaatgcaaatgaaggaatgcaataaagagtaaatatacttgaaaagcgggaaagggcgcagggtttgaaacattggcggacgacgtagaccagcaacaaactaccaacactgtagaggagcccctggatcttatcaggctcagcctagatgagcgaatttatgtgaaaatgagaaatgaccgagagcttcgaggcagattacatgcttatgatcaacatttaaatatgatcttggggagatgtggaagaaactgtgactactatagaaattgcatgaagaaaccatatgaagagatatataaatcaacgaaacggaatttttccaatgctcttttgtccggggagatggcgttttcctgggttgcccctccactgagagttggctgaaacaaagaatttgtcctgtatggaaaacgggagactttgtacagtggcctctctaaaagtacaaaacattcataagagaaacctgcatacattttgatattaagaaataattccggggattcttccactcctgaaatgagttgatttgcagataactcacaacttcttaagctaaatggtattttcatttttctcaagctctccaataaatatgaccaccaagatgcagaactcttatccgnncccgtnctnnttacntgnttncggacaccgnctcggcccgcagagcttgccccctccccacccgcagacatgtccgagtccaagagcggccccgagtatgcttcgtttttcgncgtcatgggcgncttggccgccatggtcttcagcgccctgggcgctgcctatggcacagccaagagcggtaccggcattgcggccatgtctgtcatgcggccggagcagatcatgaagtccatcatcccagtggtcatggctggcatcatgggcatctacggcctggtggtggcagtcctcatcgccaactccctgaatgacgacatcagcctntacaagagcttcctncagctnggcgccggcctgagcgtgggcctgagcggcctggcagccggctttgccatcggcatcgtgggggacgctggcgtgcggggcaacgcccagcagccccgactattcgtgggcatgatcctgattctcatcttcgccgaggtgctcggcctctacggtctcatcgtcgccctcatcctctccacaaagtagaccctctccgagcccaccagccacagaatattatgtaaagaccacccctcctcattccagaaccaacagcctgacacatacgcacggggccgccgcccccagtagttggtcttgtacatgcgcagtgtcctagtgcccatcgtctgtttccccggccttgcccccgcccgccccgtgccgtggacatctgggcccactcatcgcccctccaggcccccggcgccccaccccctaggagtgctctgtgtatgcggatgatttagaattgtcatttctctttactggatgtttatttataaagatctggcctgttcctgcgtctgcggagcggcccttgtctcccagctatctataaccttagctagagtgtcgccttgtgggttcctgttgctgagacttcctggatggagccgccctcaccgccgggcccgtggccctgcgcggagctgtgtccaataaagttcttggatgtgaaaaataaaaaacttagtgtatatagaaactagacaaagtgtgagtatgggatcattttggggtcctccgcccgcgcccgacggagcctgttcgcgtcgactgcccagagtccgcgaatcctccgctccgagcccgtccggactcccccgatcccagctttctctcctttgaaaacactaagaataatgtcactgcatcagtttttactagagccaatcacctgtcatgcctggaacagggatcgtactcagattgccctcagtcccaataatcacgaagtgcaacatctataagaagaacgggagccagtgggtgaaagctcatgaactcaaggagcacaacggacacatcacaggtattgactgggctcccaagagcgaccgcattgtcacttgtggggcagaccgcaatgcctatgtctggagtcagaaagatggtgtttggaagccaaccctggtgatcctgagaattaatcgcgcagtaacttttgtgaagtggtcccccctagagaacaaatttgctgtgggaagtggagcacgactcatttctgtttgttactttgagtctgaaaatgactggtgggtgagcaagcacattaaaaagccgattcgctccacagtcctcagcttggattggcatcccaaccaacgttttgctggcagcaggatcatgtgacttcaaatgcagagtgttttctgcctacattaaagaagtgggatgaaaagccagccagcacgccctggggcagcaagatgccttttgggcagctgatgtcagagtttggtggcagtggcactggtggctgggtccacggggtaagcttctctgcccagtgggagccgcctggcctgggtcagccacgacagcaccgtgtctgttgctgatgcctcaaaaagtgtgcaggtctcgactctgaagacagagttcctgccgctcctaagtgtgtcatttgtctcagagaacagcgtcgtggctgctggccatgactgctgcccaatgctctttaactacgatgaccgcggctgcctgaccttcgtctccaagttaagatattccaaaacaagagcatccaacgcaacatgtctgccatggaacgcttccgcaacatggacaagagagccacaactgaggaccgcaacacggaccttggagacgctgcaccagaatagcatcactcaagtctctatttatgaggtggacaagcaagattgtcgcaaattttgcactactggcatcgatggagccatgacaatttgggatttcaagaccctcgagtcttccatccagggcctccggataatgtgaagctgagtgagcctccgccatccagcatgacaaactgtggccgaccgcagctgtgccgtggcacgatggcgaggaagccagccccaaggaaacactgaaaacacatatcacgccaatgccgtgtggttttgtttgaatataaaattggtgaaagtgttggtttttttaaggcagtaatttttttgtttgtntttttgcgatttcattccattcttgaccaaagcttctctttaagtagtttattatggaaaattgtcacactaacttaaaagacagggtgagggagatatgtaaattgtccactagaaaattaaataaaagaactgaatgtggaaaannaaaa

SEQ ID NO: 279 - DNA, 1181 bp; single-stranded, linear
  immediate source library: COLNFET02
  immediate source clone: 1307464
ggctgcctcacttctgcctgatttgggaagcgctgcaaggacaaccggctggggtccttgcgcgccgcggctcagggaggagcaccgactgcgcccgcaccctgagagatggttggtgccatgtggaaggtgattgtttcgctggtcctgttgatgcctggcccctgtgaatgggctgtttcgctccctatacagaagtgtttccatgccacctaagggagactcaggacagccattatttctcaccccttacattgaagctgggaagatccaaaaaggaagagaattgagtttggtcggtcctttcccaggactgaacatgaagagttatgccggcttcctcaccgtgaataagacttacaanagnaaacttttctnntngttctttcnangttagatacaagccagaaggatgcccccatagttttttnggtaaaaggtggccngggagggttcaatccatgttttggactntttgtgggaacatgggncttatgttgtcacaagtaacattgaatgttacaggatgtagtaattactataactttttgcggtgcacggaacctgaggatcagctttactatgtgaaatttttgtcactcccagaggtgagacagccatccacgtggggaatcagacttttaatgatggaactatagttgaaaagtacttgcgagaagatacagtacagtcagttaagccatggttaactgaaatcatgaataattataaggttctgatctacaatggccaactggacatcatcgtggcagctgccctgacagagcgctccttgatgggcatggactggaaaggatcccaggaatacaagaaggcagaaaaaaaagtttggaagatctttaaatctgacagtgaagtggctggttacatccggcaagcgggtgacttccatcaggtaattattcgaggtggaggacatattttaccctatgaccagcctctgagagcttttgacatgattaatcgattcatttatggaaaaggatgggatccttatgttggataaactaccttcccaaaagagaacatcagaggttttcattgctgaaaagaaaatcgtaaaaacagaaaatgtcataggaataaaaaaattatcttttcatatctgcaagatttttttcatcaataaaaattatccttgaaaaaaaaaaaaaaagaat

SEQ ID NO: 280 - DNA, 2093 bp; single-stranded, linear
  immediate source library: COLNFET02
  immediate source clone: 1307568
agtttataatgttttactatgatttagggcttttttttcaaagtncaaaaattataagcataaaaactcaggnatcagaaagactcaaaaggctgtttttcactttnttcagatttttntttccaggcattaagtgtgtcatacagttgttgccactgctgttttccaatgtacatgtaacagnaatatggcaaaaatgagnactacttacttttatgggnaatgggcagtaggaaaataaggaaatttcttttggacacaatgcaggcaaggaacttcaaattgggagctgnatgatggttgaagcatttgttattgacggccgttaagnaactnaaaatggtctactntcaaaattgtatcagaacccagnggaaaagtagnttctttgtgtggacctctacatgataggagttggtaaaaagggaagttggtggtaaagatccttggactttgaggtcaggctgcctccattcacattcttactccacctcttaatgagcacttctgaactgcttcatagttgataaagggggcagagtaatactgtttgtctcctaggttgttgtgaggaataaatgagatgtaaggcaagtgaagcacttagtgtcttggcatgtggttctgctgctgcttactatttgattaccttggtgctttctctccagctatgtttttatctacaattaatatatttcattttgttaaaacagatgacagcagcgtcgcgcggcccagttcccttttccggtcggcgtggtcttgcgagtggagtgtccgctgtgcccgggcctgcaccatgagcgtcccggccttcatcgacatcagtgaagaagatcaggctgctgagcttcgtgcttatctgaaatctaaaggagctgagatttcagaagagaactcggaaggtggacttcatgttgatttagctcaaattattgaagcctgtgatgtgtgtctgaaggaggatgataaagatgttgaaagtgtgatgaacagtgtggtatccctactctttgatcctggaaccagacaagcaagaagctttgattgaaagcctatgtgaaaagctggtcaaatttcgcgaaggtgaacgcccgtctctgagactgcagttgttaagcaaccttttccacgggatggataagaatactcctgtaagatacacagtgtattgcagccttattaaagtggcagcatcttgtggggccatccagtacatcccaactgagctggatcaagttagcaaaatggatttctgactgggaatctcaccactgaaaaaaagcacacccttttaagactactttatgaggcacttgtggcttgtaagaagagtgatgctgcttcaaaagtcatggtggaattgctcggaagttacacagaggacaatgcttcccaggctcgagttgatgcccacaggtgtattgtacgagcattgaaagatccaaaatgcatttctttttgaccaccttcttacttctaaaaccagtccaagtttttggaaggcgagcttattcatgatcttttaaccatttttgtgagtgctaaattggcatcatatgtcaagttttatcagaataataaagacttcattgattcacttggcctgttacatgaacagaatatggcaaaaatgagactacttacttttatgggaatggcagtagaaaataaggaaatttcttttgacacaatgcagcaagaacttcagattggagctgatgatgttgaagcatttgttattgacgccgtaagaactaaaatgggtctactgccaaaaattgatcagacccagagaaaagtagttgtcagtcatagcacacatcggacatttggaaaacagcagtggcaacaactgtatgacacacttaatgcctggaaacaaaatcttgaacaaagtgaaaaaccaggccttttgagtctttctgatacctgagtttttatgcttataatttttgttctttgaaaaaaaagccctaaatcatagtaaaacattataaactaaaaataaaaagtaaanaatnaaggnnagaattngngaggaaaaaaatgnaggtnntggagngnnatnnngnagtttnatnnattgnagg

SEQ ID NO: 281 - DNA, 3088 bp; single-stranded, linear
  immediate source library: COLNFET02
  immediate source clone: 1310265
ccccaccatatgtattttctaggatttgagaggaaagagaggaaaatgggggaatgggttgcaaaatagaaatgagcttaatccaggccgcagagccagggaaggtgagtaactttaggagggtgctagactttagaagccagataggaagaatcagtctaaactggccatgctttggaagggacaagactatgtgctccgctgcccaccttcagcctgcaatgagggactgaggcccacgagtctttccagctcttcctccattctggccagtccctgcatcctccctggggtggaggatggaaggaaagctgggacaagcagggaacgcatgattcagggatgctgtcactcggcagccagattccgaaactcccattctccaatgacttcctcaaaccatggggtggccttgtgactgttctttaaggctgaagatatccaggaaagggggcttggacactggccaaggagaccccttcgtgctgtggacacagctctcttcactctttgctcatggcatgacacagcggagaccgactccaacaacgaatttggggctacggagaggaatagcgaaaaagcaaaatctgtttcaaactgatgggaaccctatagctatagaacttgggggctatcttctatgcccctggacaggacagttggctggggacaggagaagtgctcaatcttcatgagacaaaggggcccgatagggcaagcagccacaaggccttgacctgccgagtcagcatgccccatctctctgcaacagctgtcccctaaacccaactcacgtttctgtatgtcttaggccagtatcccaaacctcttccacgtcactgttctttccacccattctccctttgcatcttgagcagttatccaactaggatctgccaagtggatactggggtgccactcccctggagaaaagactgagccaggaactacaagctccccccacattcctcccagcctgggacctaattcttgagaggggctctctcttcacggactgtgtctggactttgagcaggcttctgccccttgcgttggctctttgctgccagccatcaggtgggggattagagcctggtgtaagtgcgccagactcttccggtttccaaagttcgtgcctgcgaacccaaacctgtgagtctcttctgcatgcaggagtttctcctggggcagctggtcactccccagagaagctgggccttcatggacacatggaactaagcctcccaaatgggagttctggctgagcccagggtggggagatcctgggaagggaggcactggaggaagacggcacctcttcccccatggcaagggtgtgagggaggcaggtttggaatggtgcgagtatggcaatctaagcaggggtctggtctctttgactccaggctggcctttggccgactgtctgctcacccagagaccttggactccggactatccatggctccgaatctaagtgctgcccactcccatgctcacacccacagaaggtctctcccatcccctttagattcgtgcctcactccgccagtgaggaagatgcctctgtctttcccacgactgccaggagatagggaagcccagccaggactgaccctccttcctccagcctgccctgacccacctggcaaagcagggcacatggggaggaagagactggaacctttctttgacagccaggcctagacagacaggcctggggacactggccccatgaggggaggaaggcaggcgcacgaggtccagggaggcccttttctgatcatgccccttctctcccaccccatctccccaccaccacctctgtgggcttccatggtacccccacagggctggcctcccctagagggtgggcctcaaccacctgctcccgccacgcaccggttagtgagacagggctgccacggcaaccgccaagcccccctcaaggtgggacagtaccccggacccatccactcactcctgagagggctccggcccagaatgggaacctcagagaagagctctaaggagaagaaaccccatagcgtcagagaggatatgtctggcttccaagagaaaggaggctccgttttgcaaagtggaggagggacgagggacaggggtttcaccagccagcaacctgggccttgtactgtctgtgtttttaaaaccaactaaagtgcaagaattacattgcactgtttctccactttttattttctcttaggcttttgtttctatttcaaacatactttcttggttttctaatggagtatatagtttagtcatttcacagactctggcctcctctccctgaaatcctttttggatggggaaagggaaggtggggagggtccgaggggaaggggaccccagcttccctgtgcccgctcaccccactccaccagtccccggtcgccagccggagtctcctctctaaccgccactgtcacaaccgtagcccacatggatagcacagttgtcagacaagattccttcagattccgagttgccctaccggtttgttttcgttgttgtngttgtngnnnnnnnnnnnnnnnnnnnnnnngaagacagcaataaccacagtacatattactgtagttctctatagttttacatacattcataccataactctgttctctcctcttttttgttttcaactttaaaaacaaaaataaacgatgataatctttactggtgaaaaggatggaaaaataaatcaacaaatgcaaccagtttgtgagacaaaaaaaaaaaaagccgaaaaaaaaaaaaaaaaaacacctgaatgcggaagagctcgggctccctgttttagcattttgtacttaaggaaataaaaaaccaacaaaggatctcacattttcttaaaaagtgaagattgctgtatactatttattcaacttataatttatgttactccttgatctttgtcttttgtcatgacaaagcatttatttaataaagttatggcattcagttaaaaaaannnannntgtnncnggnggtgtcanagacagngnnnatggnngatnannatnangnnggagngacggtanntgtgggngggngcccc

SEQ ID NO: 282 - DNA, 2826 bp; single-stranded, linear
  immediate source library: BLADNOT04
  immediate source clone: 1317697
aaaggtgacaaatttcagtacctctggcatgctgtcccagggaaactagggctcccactaacttatgaggtttttaaacacattgaaaatgacatgacattaaaataaatttggatttgctcatgcagcttctcgctctcgcctgcctgcccgctcccttgcttgctcgcgctttcgctcgccctctcctcgaggatcgaggggactctgaccacagcctgtggctgggaagggagaccagaggcggcggcggctcaggggaaacgaggctgcagtggtggtagtaggaagatgtcgggcgaggacgagcaacaggagcaaactatcgctgaggaccctggtcgtgaccaagtataagatggggggcgacatcgccaacagggtacttcggtccttggtggaagcatctagctcaggtgttgtcggtactgagcctgtgtgagaaaggtgatgccatgattatggaagaaacagggaaaatcttcaagaaagaaaaggaaatgaagaaaggtattgcttttcccaccagcatttcggtaaataactgtgtatgtcacttctcccctttgaagagcgaccaggattatattctcaaggaaggtgacttggtaaaaattgaccttggggtccatgtggatggcttcatcgtaatgtagctcacacttttgtggttgatgtactcnggggnccaagtaacagggaggaaagcagatgttattagggcagccccctttgtgcgggcaggcccaggctgaagtctatggaggtgcgggtcggcgaccaggatgagcgcagagaggggaccctggcaggctccgacccgaggccgtttgttaggaggggtacttcggtccttggtggaagcatctagctcaggtgtgtcggtactgagcctgtgtgagaaaggtgatgccatgattatggaagaaacagggaaaatcttcaagaaagaaaaggaaatgaagaaaggtattgcttttcccaccagcatttcggtaaataactgtgtatgtcacttctcccctttgaagagcgaccaggattatattctcaaggaaggtgacttggtaaaaattgaccttggggtccatgtggatggcttcatcgctaatgtagctcacacttttgtggttgatgtagctcaggggacccaagtaacagggaggaaagcagatgttattaaggcagctcacctttgtcctgaagctgccctacgcctggtcaaacctggaaatcagaacacacaagtgacagaagcctggaacaaagttgcccactcatttaactgcacgccaatagaaggtatgctgtcacaccagttgaagcagcatgtcatcgatggagaaaaaaccattatccagaatcccacagaccagcagaagaaggaccatgaaaaagctgaatttgaggtacatgaagtatatgctgtggatgttctcgtcagctcaggagagggcaaggccaaggatgcaggacagagaaccactatttacaaacgagacccctctaaacagtatggactgaaaatgaaaacttcacgtgccttcttcagtgaggtggaaaggcgttttgatgccatgccgtttactttaagagcatttgaagatgagaagaaggctcggatgggtgtggtggagtgcgccaaacatgaactgctgcaaccatttaatgttctctatgagaaggagggtgaatttgttgcccagtttaaatttacagttctgctcatgcccaatggccccatgcggataaccagtggtcccttcgagcctgacctctacaagtctgagatggaggtccagggatgcagagctaaaggccctcctccagagttctgcaagtcgaaaaacccagaaaaagaaaaaaaagaaggcctcccaagactgcagagaatgccaccagtgggggaaacattaggaaggaaaatgaagctgggggacttgaggtgggtcccatctccccccagcttgctgctcctgcctcatccccttcccaccaaaccccagactctgtgaagtgcagttcttctccacctaggaccgccagcagagcggtggggatctccctgcccccaccccagttccccaacccactcccttccaacaacaaccagctccaactgactctggtcttgggaggtgaggcttcccaaccacggaagactactttaaatgaaaaaaagaaattgaataataaaatcaggagtcaaaattcatcgtcttcaagcccctctttctagccttttctactactctctgcttggtcaaggtttgtgccccactacagaacagggctaaattagccaccaccactgaaaactcagccgaatttttttataccactctgatgtcagcattttttccatctgtttggggctttttcctcttttttccattctccccaaatattttatctggcttcaaaattaagaggattatttttcagattgttttttattcaggtgtggccgattcctcatctgattcaggctgtccagtcaggcccctcccattttaggagctggagccttcatttatgaagagattctcatctatgaaatggatcctcatttgtaaatcttttttcttccattttcacaaagctgtaaagaaataatccatctcaaccttaccctttttctctggagtcagtggggtctttcctcgctccatcttacacagacctgagctggaagctcaactggttttgttccctgtttgaaatattgtgatctccctcccatgaaagaaaaaccaagaaccagaggcgtagactgactgangacacaactcctggctttctgaagctatggacttggattggatt

SEQ ID NO: 283 - DNA, 580 bp; single-stranded, linear
  immediate source library: BMARNOT02
  immediate source clone: 131925
cggctcgagctggcatctttactggactggaagcaggagacagaacagtgtctgtcccggggtgacttcatcaggagaccgcccncatagagctggaccccgcagctgaagcggaaatgtgagacaggctggcacctccggaaaaacagcctttcagccttggtgttccgtgcaaggctgaaaagaaataggtcctcccagtttacagcttgaaatcaggctagtgagtggccctggagaccacgaggggagaatttaaaggccccggctggcagggtctaggtggctggcagaggcacatgcagaccctgcctggagcctgccctaggacgctgggcgggtcagtctccgtgcaggatgtgagcagcgtccctgggctctatccgcgaggtgccagtagcgtgtgcaggtacatacacgtgcgtgcacactgtgatgacacccggaaatgtctcaggatgttgaaatgtgtccttgggggcagaagtgtccccagttgagaatctgccccagaggaacacacccacaccaggcctcaggattttgtgttgatcaagttccaaggaaaaggaacatctca

SEQ ID NO: 284 - DNA, 635 bp; single-stranded, linear
  immediate source library: BMARNOT02
  immediate source clone: 132313
gccnanccctctgttcacncttttanaattttgggcccccaanaaggntaggncagaccggaccgtacagtantctaanttgccgntnnngtttngggngtcancattggaaactgtgccanaagtgttaaatcatgttgtagcaataaantntttnnnaaggcttaatttgggaggggggacntgnntctgtttncngtgnatacctnccntccctccncntctcccccnacacccngncnaaatacagttnggaattcactgaaacattaccngcaantcntganatttnctantaaagatgngaaagatggttgaagnaaattagtgcataatttctcagtgaataaagttgtagctctcatatactaaatagncaagtttncatgctgttatttagaaaatgactaaaatattaaaaaccgtgttgtgttaatctgttttaagtcataccatgttcagagttctatgtaaggtgggttttattttncttttaagggatagtttgtaatagtaagaactgtcccatatgttagtaaattacatatgtacaaattgaaactgtaaattgtgaacactggaaagcaccattgtgacatagagtaaacatcttagtaatatattaaagtgaatgt

SEQ ID NO: 285 - DNA, 640 bp; single-stranded, linear
  immediate source library: BMARNOT02
  immediate source clone: 132537
aaaaaagggncttttnactttttnccccccgggggtnttttnaaannannnnacccannccctttggggnnnncnnggttacnccccnngnnncccaangatttttggcacaaggcccccctttctncngncagtatggccgcccccaagatagaggntcctaanctagaaatggctttgaagcccatgactccctgtaatcgtatgcaaaacttcaaatgaatgggactgtgtgcctttttctgtggagagggtccataactttgattagagacaaagtgggatttatgaactaaaaaagaaataatgtccctttactttcttaaagtatggtgcatggattagattaccaagacagatgctcagagaaactagacaagttcttttgttttttccaattcctcaaactttccaatttacattcagctcacgtaactactcttcagctctgtgccaagtgctttgnatggtctaattagtgtcaaaatacctttgcatgtagcaagaacctgtgctttcagaaagtccatgttaatactatagccaacctatagctaagctttgtacagtctcttttcagttatctaaaattctgctcacccaaactaccttttaaaattcccatatcatttgcttacaa

SEQ ID NO: 286 - DNA, 1954 bp; single-stranded, linear
  immediate source library: LPARNOT02
  immediate source clone: 1326793
cgccatggccgggctatcccgcgggtccgcgcgcgcactgctcgccgccctgctggcgtcgacgctgttggcgctgctcgtgtcgcccgcgcggggtcgcggcggccgggancacggggantgggangaggnctcccggctgcngncgctacnancccgcgaggacgcggcgcgcgtggcccgcttcgtgacgcacgtctccgactggggcgctctggccaccatctccacgctggaggcggtgcgcggccggcccttcgccgacgtcctctcgctcagcgacgggcccccgggcgcgggcagcggcgtgccctatttctacctgagcccgctgcagctctccgtgagcaacctgcaggagaatccatatgctacactgaccatgactttggcacagaccaacttctgcaagaaacatggatttgatccacaaagtcccctttgtgttcacataatgctgtcaggaactgtgaccaaggtgaatgaaacagaaatggatattgcaaagcattcgttattcattcgacaccctggagatgaaaacctgggccttccagccataattggttctttgctaagttgaatataaccaatatctgggtcctggactactttggtggaccaaaaatcgtgacaccagaagaatattataatgtcacagttcagtgaagcagactgtggtgaatttagcaacacttatgaagtttcttaaagtggctcatacacacttaaaaggcttaatgtttctctggaaagcgtcccagaatattagccagttttctgtcacatgctggtttgtttgcttgcttgtttacttgcttgtttaccaatagagttgacctgttattggatttcctggaagatgtggtagctacttttttcctattttgaagccattttcgtagagaaatatccttcactataatcaaataagttttgtcccatcaattccaaagatgtttccagtggtgctcttgaagaggaatgagtaccagttttaaattgcccattggcatttgaaggtagttgagtatgtgttctttattcctagaagccactgtgcttggtagagtgcatcactcaccacagctgcctcctgagctgcctgagcctggtgcaaaaggattggcccccattatgggtgcttctgaataaatcttgccaagatagacaaacaatggatgaaactcagatggagcttcctactcatgttgatttatgtctcacaatcctgggtattgttaattcaacatagggtgaaactatttctgataaagaacttttgaaaaactttttatactctaaagtgatactcagaacaaaagaaagtcataaagctcactgaatttaatttccccacctaagtcgagacagtattatcaaaacacatgtgcacacagattattttttggctccaaaactggattgcaaaagaaagaggagaagaatattttgtgtgttcctggtattcttttataagtaaagtttacccaggcatggaccagcttcagccagggacaaaatcccctcccaaaccactctccacagctttttaaaaatacttctactcttaacaattacctaaggcttcctcaactgccccaaatctcttaatagcttctagtgctgctacaatctaagtcaggtcaccagagggaagagaacatggcattaaaagaatcacatcttcagaagagaagacactaatattattacccatatacatgatttcagaagatgacataagattcctcttaaagaggaaatgtcaggaatcaagccactgaatccttaaagagaaaagttgaatatgagtcattgtgtctgaaaactgcaaagtgaacttaactgagatccagcaaacaggttctgtttaagaaaaataatttatactaaatttagtaaaatggacttcttattcaaagcatcaataattaaaagaattattttaatg

SEQ ID NO: 287 - DNA, 370 bp; single-stranded, linear
  immediate source library: BMARNOT02
  immediate source clone: 133060
ccagccacagacgggtcatgagcgcggtattactgctggccctcctggggttcatcctcccactgccaggagtgcaggcgatgctctgccagtttgggacagttcagcatgtgtggaaggtgtccgacctgccccggcaatggacccctaagaacaccagctgcgacagggcttggggtgccaggacacgttgatgctcattgagagcggaccccaagtgagcctggtgctctccaagggctgcacggaggccaaggaccaggagccccgcgtcactgagcaccggatgggccccggcctctccctgatcttctacaacttcgtgtgccgccangaggacttntgcaaaaaactcgttaacttcntnccg

SEQ ID NO: 288 - DNA, 255 bp; single-stranded, linear
  immediate source library: BMARNOT02
  immediate source clone: 133089
tccagcttttggattcaatgagtgggaaatacattgtgcctttctctagatgtgatacgttataccaaaatctttgtagtgtgcagagcggtggtttgagactaaatacaggcttagaacttgcagagtgtgtattcttggatggctgatgcatcgacttgcattcccacttaacactttgattagcatgaacttgccaatcaaaaaatgacaatcaatttgagaaaatagaaatagatatttttaaataannca

SEQ ID NO: 289 - DNA, 364 bp; single-stranded, linear
  immediate source library: BMARNOT02
  immediate source clone: 133107
ggggcngcnctngcaaaaagggggaccccccngcntcaagaatncggnaccgaggtcaaaaattangatgccncgntannatcnagtanngttcaagtantagtntcnnccatgcagntatagctttgacctaanctngaagtccnctgtatgagaagntnnaaaatgtcacctttgannaatgttccacntactatnnctgggaaatattgttaactngncatagtcttgtncagtggaattgtgtcntgttcagaggcaatanatctcaaagaggccctgcttatcttagtttactgcaggttgaatatccctaattcaaaaaatgcgaaatctgaaatgcctcaaaatctgtaatttatca

SEQ ID NO: 290 - DNA, 760 bp; single-stranded, linear
  immediate source library: COLNTUT03
  immediate source clone: 1339742
cgggaacaagtgaactccatggtggacatctccaagatgcacatgatcctgtatgacctgcagcagaatctgagcagctcacaccgggccctggagaaacagattgacacgctggcggggaagctggatgccctgactgagctgcttagcactgccctggggccgaggcagcttccagaacccagccagcagtccaagtagctggacccacgaggaggaaccaggctactttccccagtactgaggtggtggacatcgtctctgccactcctgacccagccctgaacaaagcacctcaagtgcaaggaccaaagggggccctggcttggagtgggttggcttgctgatggctgctggaggggacgctggctaaagtgggtaggccttggcccacctgaggccccaggtggggaacatggtcacccccactctgcataccctcatcaaaaacactctcactatgctgctatggacgacctccagctctcagttacaagtgcaggcgactggaggcaggactcctgggtccctgggaaagagggtactaggggcccggatccaggattctgggaggcttcagttaccgctggccgagctgaagaactgggtatgaggctggggcggggctggaggtggcgccccctggtgggacaacaaagaggacaccatttttccagagctgcagagagcacctggtggggaggaagaagtgtaactcaccagcctctgctcttatctttgtaataaatgttaaagccag

SEQ ID NO: 291 - DNA, 246 bp; single-stranded, linear
  immediate source library: COLNTUT03
  immediate source clone: 1340453
gaaattacgatatgaaatagatactggagaagaaacaaaatttgttaacccagaagatgttgccagactgatatttagtaaaatgaaagaaacggcacattctgtattgggctcagatgcaaatgatgtagttattactgtcccgtttgattttggagaaaagcaaaaaaatgctcttggagaagcagctagagctgctggatttaatgttttgcgattaattcacgaaccgtctgcagctcttct

SEQ ID NO: 292 - DNA, 206 bp; single-stranded, linear
  immediate source library: COLNTUT03
  immediate source clone: 1341948
aattgtccggggtcaaacagaggagagcatgaatgagagtcatcctcgcaagtgtgcagagtcttttgagatgtgggatgatcgtgactcccactgtaggcgccctaagtttgaagggcatccccctgagtcttggaagtggatccttgcaccggtcattctttatatctgtgaaaggatcctccggttttaccgctcccagcaga

SEQ ID NO: 293 - DNA, 1307 bp; single-stranded, linear
  immediate source library: PROSNOT11
  immediate source clone: 1344641
cagcgacgaggtggaccgcatcagtgagtggaagcggcgggacgaggcgcggaggcgcgagctggaggcccggcggcggcgagagcaggaggaggagctgcggcgcctgcgggagcaggagaaggaggagaaggagcggaggcgcgagcgggccgaccgcggggaggctgagcggggcagcggcggcagcagcggggacgagctcagggaggacgatgagcccgtcaagaagcggggacgcaagggccggggccggggtcccccgtcctcctctgactccgagcccgaggccgagctggagagagaggccaagaaatcagcgaagaagccgcagtcctcaagcacagagcccgccaggaaacctggccagaaggagaagagagtgcggcccgaggagaagcaacaagccaagcccgtgaaggtggagcggacccggaagcggtccgagggcttctcgatggacaggaaggtagagaagaagaaagagccctccgtggaggagacgctgcagaagctgcacagtgagatcaagtttgccctaaaggtcgacagcccggacgtgaagaggtgcctgaatgccctagaggagctgggaaccctgcaggtgacctctcagatcctccagaagaacacagacgtggtggccaccttgaagaagattcgccgttacaaagcgaacaaggacgtaatggagaaggcagcagaagtctatacccggactcaagtcgcgggtcctcggcccaaagatcgaggcggtgcagaaagtgaacaaggctgggatggagaaggagaaggccgaggagaagctggccggggaggagctggccggggaggagctggccggggaggaggccccccaggagaaggcggaggacaagcccagcaccgatctctcagccccagtgaatggcgaggccacatcacagaagggggagagcgcagaggacaaggagcacgaggagggtcgggactcggaggaggggccaaggtgtggctcctctgaagacctgcacgacagcgtacgggagggtcccgacctggacaggcctgggagcgaccggcaggagcgcgagagggcacggggggactcggaggccctggacgaggagagctgagccgcgggcagccaggcccagcccccgcccgagctcaggctgcccctctccttccccgggtngcaggagagcagagcagagaactgtggggaacgctgtgctgtttgtatttgttcccttgggttttttttttcctgcctaatttctgtgatttccaaccaacatgaaatgactataaatggttttttaatg

SEQ ID NO: 294 - DNA, 567 bp; single-stranded, linear
  immediate source library: BMARNOT02
  immediate source clone: 134481
aaaccnnnggcntnnggnaacccggattcnagggtnccaggganctccagganccttaaggtccctaacncccccctttacacccttgtctgaatcagngnattttccccattgnnctttgtgcccnccanaatagtttcaccgcatagnccatactgtaaaacaaaaatgtttaaccacaaangtgctataaatattatttttctagggagaatcatgtcaatatcnattatcagattcccaagatctgtgatgcacaaaaggcctagaaacttggaatctaagataaaaactcataaataatactttagagtttaatgcaaataactattcttataatcaatgattataattattaatggaaatcaaatttgggagaaggaaagagcaatatgaatttttatagatttgagtcaagattacatcatgataaattaatacatacaagatgaattattttcatcttaagtagacatctgtacactgctataccaaaacgaggtgcattttagttgcctcctagaccttgtcagaactcattctttgagtttactaagaaacaacttt

SEQ ID NO: 295 - DNA, 2540 bp; single-stranded, linear
  immediate source library: PROSNOT11
  immediate source clone: 1346478
gtgccaagcatggcattgaataccaggggaagccgctantnagggcccttctggacattattaggttcctgaaggaagtctnggaagctttggctggacgctaccttnaaaaatgaaggcaaaanccccggggacaacgtggggaaggggtgcangtggggtgatggncagaggaatgatgggcttttgttctgaggggtgtcgagaggctngtgtatgcactgttaaggacccatgttggatctttttcttctgggcgaatggcagcccatcgagtacggcaagaagaagctgaaatacctgccctacaatcaccagcacgaatacttcttcctgattgggccgccgctgctcatccccatgtatttccagtaccagatcatcatgaccatgatcgtccataaggacttgggtggacctgggctgggccgtcagctactacatccggttcttcatcacctacatccctttctacggcatcctgggagccctccttttcctcaacttcatcaggttcctggagagccactggtttgtgtgggtcacacagatgaatcacatcgtcatggagattgaccaggaggcctaccgtgactggttcagtagccagctgacagccacctgcaacgtggagcagtccttcttcaacgactggttcagtggacaccttaacttccagattgagcaccacctcttccccaccatgccccggcacaacttacacaagatcgccccgctggtgaagtctctatgtgccaagcatggcattgaataccaggagaagccgctactgagggccctgctggacatcatcaggtccctgaagaagtctgggaagctgtggctggacgcctagccttcacaaatgaagccacagcccccgggacaccgtggggaaggggtgcaggtggggtgatggccagaggaatgatgggcttttgttctgaggggtgtccgagaggctggtgtatgcactgctcacggaccccatgttggatctttctccctttctcctctcctttttctcttcacatctcccccatagcaccctgccctcatgggacctgccctccctcagccgtcagccatcagccatggccctcccagtgcctcctagccccttcttccaaggagcagagaggtggccaccgggggtggctctgtcctacctccactctctgcccctaaagatgggaggagaccagcggtccatgggtctggcctgtgagtctccccttgcagcctggtcactaggcatcacccccgctttggttcttcagatgctcttggggttcataggggcaggtcctagtcgggcagggcccctgaccctcccggcctggcttcactctccctgacggctgccattggtccaccctttcatagagaggcctgctttgttacaaagctcgggtctccctcctgcagctcggttaagtacccgaggcctctcttaagatgtccagggccccaggcccgcgggcacagccagcccaaaccttgggccctggaagagtcctccaccccatcactagagtgctctgaccctgggctttcacgggccccattccaccgcctccccaacttgagcctgtgaccttgggaccaaagggggagtccctcgtctcttgtgactcagcagaggcagtggccacgttcagggaggggccggctggcctggaggctcagcccaccctccagcttttcctcagggtgtcctgaggtccaagattctggagcaatctgacccttctccaaaggctctgttatcagctgggcagtgccagccaatccctggccatttggccccaggggacgtgggccctgcaggctgcaggagggcactggagctgggaggtctcgtcccagccctccccatctcggggctgctgtgtggacggcgctgcctcaggcactctcctgtctgaacctgcccttactgtgtttaacctgttgctccaggatgcattctgataggagggggcggcagggctgggccttgtgacaatctgcctttcaccacatggccttgcctcggtggccctgactgtcagggagggccagggaggcagagcgggagggagtctcaggaggaggctgccctgaggggctggggagggggtacctcatgaggaccagggtggagctgagaagaggaggaggtgggggctggaggtgctggtagctgaggggacgggcaagtgagaggggagggagggaagtcctgggaggatcctgagctgctgttgcagtctaacccactaatcagttcttagattcaaggggaagggcaggcaccaacaactcagaatgggggctttcggggagggcgcctagtccccccagctctaagcagccaggagggacctgcatctaagcatctgggttgccatggcaatggcatgccccccagctactgtatgcccccgacccccgcagaggcagaatgaacccatagggagctgatcgtaatgtttatcatgttacttccccacccctacattttttgaaataaaataaggagttttattgtcaaaggg

SEQ ID NO: 296 - DNA, 606 bp; single-stranded, linear
  immediate source library: PROSNOT11
  immediate source clone: 1347577
cggacggtgggcggacgcgtggggtctcagctctgggagggaacgggagatgttgcaggcgccgagagggcgggccagggccgcactccggagactcgcggttgctacgcgcaccatggctggagcgcccacggtctcgcttcctgaactccgttcactcctagcctccggacgggcccggctcttcgacgtgcgctctcgcgaggaggcggcagctgggaccatcccaggggcgctcaacatcccggtgtccgagttggagagtgctctgcagatggagccagctgccttccaggctttatattctgctgagaagccaaagcttggaagatgagcatctcgttttcttctgtcagatgggcaagcggggcctccaggccacgcagctggcccggagtcttggatacactggggctcgcaactacgctggagcctatagagaatggttggagaaagagagttaggcaggaggcagcttactgattgccaccccctggccccttaatggccaccttaactaagggtgtgaacgggctgacttggtgaattgggcaactccttatagtgttgtgcacacaaaagcatcaaataaagaacatttaatca

SEQ ID NO: 297 - DNA, 369 bp; single-stranded, linear
  immediate source library: PROSNOT11
  immediate source clone: 1347596
aagaaaacagaaaagaggaaaaagtttaaagaaaatgatgcatccaatattgatggttttttgggaccatgggcaaaatatgtggatgaaaaagatgtagccaaaccttcagaagaagagcaaaaagaattggatgaaatcacagcaaagaggcagaaaaaaggaaaacaggaagaagagaaacctggggaggagaagacaatcttacatgttaaagaaatgtatgactatcaaggcaggtcctatcttcacatacctcaggatgttggtgttaatctacggtcaactatgccacctgagaagtgttatcttcccaaaaaacaaattcatgtgtggtctggacacacaaagggcgtcagtgcagtcaga

SEQ ID NO: 298 - DNA, 364 bp; single-stranded, linear
  immediate source library: BMARNOT02
  immediate source clone: 134898
ccccttnnttnnaangagttttttttaccccccttctnaggaancccccncggngacctnagggggggngaaaannctccccttantttancccntacgggtaaaacccaaatccccttgccngttgggnttccnccgntaaggaagnaaaacatcaaaggnttcttcaaagaatacagaattccaaggagggctctggaggaantgtacagggtatcatgaggcctagaaaaagtgaggggacctgacctgggngttcagggaaaccttccctgaggaagggctnttaagctcagagctgactaggagataactagaagaggaggaaggaagngtgctgccactgcatcagaagtctcgtcaa

SEQ ID NO: 299 - DNA, 1066 bp; single-stranded, linear
  immediate source library: BMARNOT02
  immediate source clone: 134902
ccttaactcctccacgctgagcggcagccagatgagcctgtcaggcgacgcggaggcggtgcaggtccgcggctccgtgcacttcgcgctgcactacgagccgggcgccgccgagctgcgcgtgcacgtgatccagtgccagggcctggccgccgcccggcgccgccgctcggacccctacgtcaaaagctacctcctcccggataagcagagcaagcgcaaaacggcggtgaagaaacggaatctgaatccggttttcaacgagactctccggtactccgtcccgcaggccgagcttcagggccgcgtgctgagcctgtctgtgtggcaccgcgaaagcctgggtcgcaacatctttctgggcgaagttgaagtgcccctggacacgtgggactggggctctgagcccacctggctccccctgcagccccgggtcccaccctctcccgacgaccttccgagccgcgggttactcgccctctccctcaagtacgtccccgccggctccgagggcgcaggactgcccccgagcggggagctgcacttctgggtgaaggaggctcgggacctcctgccgctgcggggcaggatccctggacacttacgtacaatgcttcgtgctgcctgatgacagccgggccagccgccagcgtacaagggttgtgcgacgcagcctcagccctgtgttcaatcacaccatggtgtacgatggctttgggcctgctgacctgcgccaggnttgtgccgagctctccctctgggaccatggggccctggccaaccgccagctggggggcacacgcctcagtgtgggcaccggcagcagctatgggctgcaggtgccctggatggattccacacctgaggagaagcagctgtggcaagccctcctggagcagccgtgcgagtgggtggatggccttctacccctcagaaccaacctggcccccaggacgtagccccaccaagcctctctctctggacccccatctcagggcctgcccttggctaaagtcaataaagtctattctaagagcananaaataanaaanagagaaaagaaaaa

SEQ ID NO: 300 - DNA, 713 bp; single-stranded, linear
  immediate source library: LATRTUT02
  immediate source clone: 1350210
ctccccctccctggttccgcgttctggttccgccatggaatccaacaaggatgaagctgagcgctgtatcagcatcgncctcaaggccatccagagcaaccagcccgaccgggcgctccgcttcctggagaaggcacagcggctgtatccgacgccgcgagttcgcgccctgattgagtccctcaaccagaaaccacagactgccggtgaccaacccccacccacagacacaacccatgccacccacaggaaagcaggtgggaccgatgccccctcggccaacggtgaagctggaggagagagcaccaaaggctacactgcagaacaggttgcagctgtgaaaagggtcaagcaatgtaaagattactatgagatcctgggggtgagcagaggggcctcggatgaggacctgaagaaggcctaccgcagactggccctcaaattccacccagacaagaaccacgcacctggtgccactgaagccttcaaagccattggcacagcatatgcggtactcagcaacccggagaagaggaagcagtatgaccagttcggcgatgacaagagccaggcggcccggcacggccatgggcatggggatttncaccgtggntttgaggccgacatcttccctgaagacctgtttaacatgttctttggcggcgggtttccttctagtaangtcaaggtttaaagaaaggncggantggttt

SEQ ID NO: 301 - DNA, 2590 bp; single-stranded, linear
  immediate source library: LATRTUT02
  immediate source clone: 1353065
gtcttccagaaagaaatccaggtcttccagtcaatcagtgtcttccagaaagaaatccaggtcttccagtcagtcagtgtcttccagaaaaatctacgtcttccaccaaatccaggtcttccagtcaatccacatcttccggaaaaaatccaggtcttccagccaatatatgtcttcctgaagatccacgtcttccagaaaatccatgtcttccagaaaatccatgtcttccagtaacctcccagtcttncagaaaatncacgtnttcccaacaatncaagtnttncggataatttgggtcttnctgaaaatntacgtnttncaaaaaagncatgtcttccagaaaatccacatgttccaatggnctccagggaatcaaattcagtgatgacagagtatgcaagagtcaccttctcaactgttgtcctcaatgatgtcctttctggaactagaatggatcttggagaatgtctgaaagtccatgacctggctttaagagcggattatgaaattgcatccaaagaacaagattttttctttgaacttgatgccatggatcatctgcagtcattcattgcagattgtgatcgtagaacagaagtggccaagaaaagattagcagaaactcaagaagagattagtgctgaagtagcagcaaaggcagaacgtgttcatgagttaaatgaagaaattggtaaattgttagccaaggtggaacaactaggagctgaagggaatgtggaggaatcccagaaagtaatggatgaagtagagaaagcacgggcaaagaaaagagaagcagaggaagtttatcggaattctatgccagcttccagttttcagcagcagaaacttcgagtctgtgaagtctgctctgcctatttaggacttcatgataatgacagacgactggctgatcattttgggggtaaactgcacctgggatttattgaaataagagagaagcttgaagaattaaagagagtcgtagctgagaagcaggagaaaagaaaccaggaacggctgaaacgaagagaagagagagagagagaagaaagggagaagctgaggaggtcccgatcacacagcaagaatccaaaaagatccaggtccagagagcatcgcagacatcgatctcgctccatgtcacgtgaacgcaagaggagaactcgatccaaatctcgggagaaacgccatcgccacaggtcccgctccagcagccgtagccgcagccgtagccaccagagaagtcggcacagttctagagataggagcagagaacgatccaagaggagatcctcaaaagaaagattcagagaccaagacttagcatcatgtgacagagacaggagttcaagagacagatcacctcgtgacagagatcggaaagataagaagcggtcctatgagagtgctaatggcagatcagaagacaggaggagctctgaagagcgcgaagagggggagatctaactagctgtgtacatttcttcagtccttaagcttcctacggagttacgtactattgtttagttcacagctgttcagggtgacagtgagcagatccagacaccagatccagctaggctagatgtacagtatctaacttgatctgaactgaacctgttttccttgatgatgcctaaaactacatccatagtttctggtgaacctgtaatacagttctgaaagtaccagttttatataataagatgctgatctctttattctttcaagtaagagtgctagtgaacaaattgtgttacttgccttgggattttttgaacgtttgtaaaatgctgtcttcctagtccaaacagctgcagctttgggcatttttctttttaattattcttcctctgactttgtatcccttaatacctacactctccaattgtaagagaaagggggcagggaagcaatatagcttccattctaaggctgtattcccgttatgaattactagctgattacagttcagagcattgatcctggaatgtgtgctggagaaatttaaaatactggggttttttgtttaatggtgcctatttagagttggaagttgaacagctgttgcattacatacttttgcttttttattgaaattttgaaatcaaacgtcttgatttttctgttctgttgaattgctatgttcaggatgttctagggggtgggggcagggactcttttcgtaataagcacttgttttattttgtgtgtgtggagtataaaggctacacccttattgtaangntgcanataataataataaaatgaaagaaacaatcaccaccaccattattaaactgtaacttgtctagtaaattgtcactagaactatttgctgtgggcatttcctctattctgttacgtcattaacagtgccttactgtgcaaggcaccaaaggacataaatacgtacttgcaaagattccagatgagctgttcatgtgggccccttgctgactatattccagccacttcagggttgtttgtaatgaccgttatagagaagggctcgacctgcagaagaaactggggtgtttttattctcattcaacaaacccaaataaaaacagtatatgtaacc

SEQ ID NO: 302 - DNA, 305 bp; single-stranded, linear
  immediate source library: BMARNOT02
  immediate source clone: 135360
cnggggggnnngcaccncnccncacccccccccgcncccccngccactnnnnccnacacccancnnnaagngccagntctttgtnccctcctccaccccccnnnanttnacacacccacagtcagtacaaattagaatgtccncccataataaaagtanctataaaattacncagacacattctacatngtatttaacattnnagaagncaaattacacaggaantgcaataaaatgaaacatctactctcccganaaatgttgaatatacctaatcaacccaagttcagtttatttttgcacat

SEQ ID NO: 303 - DNA, 963 bp; single-stranded, linear
  immediate source library: BMARNOT02
  immediate source clone: 135394
agtcgctggccgtggttcgccgctaggtaggatatatctgccatcttgaaaggaagataaaacaaaagccttctttggaatagatggatttttgtnactttctgtgtgaactaaagtgattcaatgtctcttttggattgcttctgcacttcaagaacacaagttgaatcactcagacctgaaaaacagtctgaaaccagtatccatcaatacttggttgatgagccaaccctttcctggtcacgtccatccactagagccagtgaagtactatgttccaccaacgtttctcactatgagctccaagtagaaataggaagaggatttgacaacttgacttctgtccatcttgcacggcatactcccacaggaacactggtaactataaaatttacaaatctggaaaactgcaaatggaaggaacggctgaaagnttttacaggaaaggccgtggattgggatttgacaacttgacttctgtccatcttgcacggcatactcccacgggaacactggtaactataaaaattacaaatctggaaaactgcaatgaagaacgcctgaaagctttacagaaagccgtgattctatcccactttttccggcatcccaatattacaacttattggacagttttcactgttggcagctggctttgggttatttctccatttatggcctatggttcagcaagtcaactcttgaggacctattttcctgaaggaatgagtgaaactttaataagaaacattctctttggagccgtgagagggttgaactatctgcaccaaaatggctgtattcacaggagtattaaagccagccatatccctcatttctggtgatggcctagtgaccctctctggcctttcccatctgcatagtttggttaagcatggacagaggcatagggctgtgtatgatttcccacagttcagcacatcagtgcagccgtggctgagt

SEQ ID NO: 304 - DNA, 478 bp; single-stranded, linear
  immediate source library: BMARNOT02
  immediate source clone: 135651
atactttgttacagcaaccctagacatgaggtactagacacagtacatctacacatatgaaaatgaatcaacacagaatgcagaagtagaacccttgctaaggactactgggcatcttcccaggacagcagccaaaagagaaccaccacttcctctcctgcctcctccttgctctctcctagagtccaaacccaaatgggccagttggatctgatgttcgtcagttctttacttctatttcctggggtactcaggagggcacacactatagataacttgggttagctgcataaaattcaatgtctcattaagttgcattaaactgagcttagatgtgtaagtttgctaacggatgggtttttttgttaagaactataggatttatgggaccaagtctagcgagtccagatatcaaaatcattataatgttatatttgctgttattagaatataatatagcttattatacaataaatat

SEQ ID NO: 305 - DNA, 260 bp; single-stranded, linear
  immediate source library: LUNGNOT12
  immediate source clone: 1362601
gaaaggacggaggctgttatctatggcagatctatccaataaaggagagaaaggaccgcatacgcctggttctcatcatatgcaataaagagtttgaccatctgcctccaagaaatggggctgactttgccatcatggagatgaagaagctgcttgaggatctgggttacagtgtggatgtagaagagaatctgacagccaggataacgtgtccaggagagacagcaccaagggggttccatctttcatcacacaacttc

SEQ ID NO: 306 - DNA, 3307 bp; single-stranded, linear
  immediate source library: LUNGNOT12
  immediate source clone: 1363543
ctgagggcggccgaagtggctggctcatttaagatgaggcttctgctgcttctcctagtggcggcgtctgcgatggtccggagcgaggcctcggccaatctgggcggcgtgcccagcaagagattaaagatgcagtacgccacggggccgctgctcaagttccagatttgtgtttcctgaggttataggcgggtgtttgaggagtacatgcgggttattagccagcggtacccagacatccgcattgaaggagagaattacctccctcaaccaatatatagacacatagcatctttcctgtcagtcttcaaactagtattaataggcttaataattgttgggcaaggatcctttttgctttcttttggcatgcaagctcctagcatctggcagtggggccaagaaaataaggtttatgcatgtatgatggttttcttcttgagcaacatgattgagaaccagtgtatgtcaacaggtgcatttgagataactttaaatgatgtacctgtgtggtctaagctggaatctggtcaccttccatccatgcaacaacttgttcaaattcttgacaatggaaatgaagctcaatgtgcatatgggnttcaatcccacaaccatcggtccatagcaccacctatcaggcactgaaaactcttttgcattaaggggtccattgcaaggagcagcgtgactgacattatgaaggcctgtactgaagacagcaagctgttagtacagaccagatgctttcttggcaggctcgttgtacctcttggaaaacctcaatgcaagatagtgtttcagtgctggcatattttggaattctgcacattcatggagtgcaataatactgtatagctttccccacctcccacaaagtcacccagttaatgtgtgtgtgtgttttttttttaaggtaaacattactacttgtaactttttttcttagtcatatttgaaaaagtagaaaattgagttacaatttgattttttttccaaagatgtctgttaaatctgttgtgcttttatatgaatatttgttttttatagtttaaaattgatcctttgggaatccagttgaagttcccaaatactttataagagtttatcagacatctctaatttggccatgtccagtttatacagtttacaaaatatagcagatgcaagattatgggggaaatcctatattcagagtactctataaatttttgtgtatgtgtgtatgtgcgtgtgattaccagagaactactaaaaaaaccaactgctttttaaatcctattgtgtagttaaagtgtcatgccttgaccaatctaatgaattgattaattaactgggcctttatacttaactaaataaaaaactaagcagatatgagttaaatttctatgagagtacacgcagtgggcgacggatggagctgagtatggggcccatccaggctaatcacacgggcacaggcctgctactgaccctgcagccagaacagaagttccagaaagtgaagggatttggaggggccatgacagatgctgctgctctcaacatccttgccctgtcaccccctgcccaaaatttgcctacttaaatcgtacttctctgaagaaggaatcggatataacatcatccgggtacccatggccagctgtgacttctccatccgcacctacacctatgcagacacccctgatgatttccagttgcacaacttcagcctcccagaggaagataccaagctcaagatacccctgattcaccgagccctgcagttggcccagcgtcccgtttcactccttgccagcccctggacatcacccacttggctcaagaccaatggagcggtgaatgggaaggggtcactcaagggacagcccggagacatctaccaccagacctgggccagatactttgtgaagttcctggatgcctatgctgagcacaagttacagttctgggcagtgacagctgaaaatgagccttctgctgggctgttgagtggataccccttccagtgcctgggcttcacccctgaacatcagcgagacttcattgcccgtgacctaggtcctaccctcgccaacagtactcaccacaatgtccgcctactcatgctggatgaccaacgcttgctgctgccccactgggcaaaggtggtactgacagacccagaagcagctaaatatgttcatggcattgctgtacattggtacctggactttctggctccagccaaagccaccctaggggagacacaccgcctgttccccaacaccatgctctttgcctcagaggcctgtgtgggctccaagttctgggagcagagtgtgcggctaggctcctgggatcgagggatgcagtacagccaacagcatcatcacgaacctcctgtaccatgtggtcggctggaccgactggaaccttgccctgaaccccgaaggaggacccaattgggtgcgtaactttgtcgacagtcccatcattgtagacatcaccaaggacacgttttacaaacagcccatgttctaccaccttggccacttcagcaagttcattcctgagggctcccagagagtggggctggttgccagtcagaagaacgacctggacgcagtggcactgatgcatcccgatggctctgctgttgtggtcgtgctaaaccgctcctctaaggatgtgcctcttaccatcaaggatcctgctgtgggcttcctggagacaatctcacctggctactccattcacacctacctgtggcgtcgccagtgatggagcagatactcaaggaggcactgggctcagcctgggcattaaagggacagagtcagctcacacgctgtctgtgactaaagagggcacagcagggccagtgtgagcttacagcgacgtaagcccaggggcaatggtttgggtgactcactttcccctctaggtggtgccaggggctggaggcccctagaaaaagatcagtaagccccagtgtccccccagcccccatgcttatgtgaacatgcgctgtgtgctgcttgctttggaaactgggcctgggtccaggcctagggtgagctcactgtccgtacaaacacaagatcagggctgagggtaaggaaaagaagagactaggaaagctgggcccaaaactggagactgtttgtctttcctggagatgcagaactgggcccgtggagcagcagtgtcagcatcagggcggaagcttaaagcagcagcgggtgtgcccaggcacccagatgattcctatggcaccagccaggaaaaatggcagctcttaaaggagaaaatgtttgagccc

SEQ ID NO: 307 - DNA, 2623 bp; single-stranded, linear
  immediate source library: SYNORAB01
  immediate source clone: 136466
atattattgtagatctagaagtcacttcctcttggaatatttctgtcttgctgacgaggggttcctccaaacatgaaaccaaaatccccaaagaggaagtgatattattgtagatctagaagtcactttggaagaagtatatgcaggaaattttgtggaagtagttagaaacaaacctgtggcaaggcaggctcctggcaaacggaagtgcaattgtcggcaagagatgcggaccacccagctggggccctgggcgcttccaaatgacccagggaggtggtctgcgacgaatgccctaatgtcaaactagtgaatgaagaacgaacgctggaagtagaaatagagcctggggtgagagacggcatggagtacccctttattggagaaggtgagcctcacgtggatggggagcctggagatttacggttccgaatcaaagttgtcaagcacccaatatttgaaaggagaggagatgatttgtacacaaatgtgacagtctcattagttgagtcactggttggctttgagatggatattactcacttggatggtcacaaggtaccatatttcccgggataagatcaccaggccaggagcgaagtatggaagaaaggggaagggctccccaactttgacaacaacaatatcaagggctctttgataatcacttttgatgtggattttccaaaagaacagttaacagaggaagcgagagaaggtatcaaacagctactgaaacaagggtcagtgcagaaggtatacaatggactgcaaggatattgagagtgaataaaattggactttgtttaaaataagtgaataagcgatatttattatctgcaaggtttttttgtgtgtgtttttgtttttattttcaatatgcaagtnaggcttaatttttttatctaatgatcatcatgaaatgaataagagggcttaagaatttgtccatttgcattcggaaaagaatgaccagcaaaaggtttactaatacctctccctttggggatttaatgtctggtgctgccgcctgagtttcaagaattaaagctgcaagaggactccaggagcaaaagaaacacaatatagagggttggagttgttagcaatttcattcaaaatgccaactggagaagtctgtttttaaatacattttgttgttatttaacctatttggcttctgttttgtgaacctttgaactatatgtatgtgtataagggtatacacatacatatatggcatataacaagtgtacacatatacacataacaagtgtagaagtatatattacatacatacactcactctgtctggtataggctaattttgaagaactcccataagtttctgctgcttctcccataactgctgccaccaccatcagaattcataatcaaacctaacctttttgtttggggcaccaaatctgaagacaaaattaatttgcaccagtaaacttcaagctgctttctttcttgaaaactaaacgtttaacgtataatgtctgtttggatactgttccaaattgttgattgcatgtggttaatgttgcattagagcactttgcaattgcataattcattaatgttttgtgagcttgcatttgtgagttattggatgatcagactgaattttgtcaagtatcacattgtacatcttgcctagatgtcgatgactgcaagtaataatacagtttataatgaaactatctacaattcttgttttagcacatctgttatccgtaaaacacctgtaactagcttttttaatttattatttgaattttaggatagcgaatcactaatttttagttgctgaggttggcattttagtgattattaagcacttctgtcagtctttgaaaaaagaacgtattttttgtgctttgaagatctctgaagaatttcttttataatagaatggggcatgtattgtaacagttttatgtcaaatgatctgtgctgtagaaaaacattaacccttgtttcaaaaaagaaatggataaacttggcctttctaagtggtaagaatgacctgtcactataatatactgtatgtttacattttatttaaatttaatctcttatgtatagggtgataaccttccccagaaacaacagtgattgcgattgttttctagaaacttctttaaagtgccacatttggcagtacaaatgagtctgagtgtaatagcccagagatttatatatagttgaatggcctaaaatgggtaaaatgtgccactgtgtcaagttacagtggcttatgtttttcatagtaattcaaatgaacttcctatttttgatagtaaatgtcatttaatagtatacttgccatttgagcctcactgcaaaattagtgcagaggagaaaacaatttttaatgtaatcttgattttacctcatatactgtacattccaaaaactctaaactttttaaagattatagatacactaccaaacatatcaccttaaaattgtataaggctgaatgaacttcatacaaatgaaaaaaatctcataaaaatacataaactatgtagcaaaagtatctgtaaaatccatggaaaataaaagttgtatcattctttttgaaaaaaanaaaaaaaaaactnggtcgacg

SEQ ID NO: 308 - DNA, 620 bp; single-stranded, linear
  immediate source library: LUNGNOT10
  immediate source clone: 1378524
attctttcaagcttgtttttgccataatggtagtcttccttctgatgtgggcgccctacaatattgcatttttcctgtccactttcaaagaacacttctccctgagtgactgcaagagcagctacaatctggacaaaagtgttcacatcactaaactcatcgccaccacccactgctgcatcaaccctctcctgtatgcgtttcttgatgggacatttagcaaatacctctgccgctgtttccatctgcgtagtaacaccccacttcaacccagggggcagtctgcacaaggcacatcgagggaagaacctgaccattccaccgaagtgtaaactagcatccaccaaatgcaagangaataaacatggattttcatctttctgcattatttcatgtaaattttctacacatttgtatacaaaatcggatacaggaagaaaagggagaggtgagctaacatttgctaagcactgaatttgtctcaggcaccgtgcaaggctctttacaaacgtgagctccttcgnctctaccacttgtccatagtgtggataggactagtctcatttctctgagaagaaaactaaggcgcggaaatttgtctaaggtcacataactagggt

SEQ ID NO: 309 - DNA, 3701 bp; single-stranded, linear
  immediate source library: BRAITUT08
  immediate source clone: 1382605
ttcacttagtgacattatgtgtgacagaattaaatgaccgggaagaaaacgaaaaccactttccagtaatatatggcattgagtcatcctgttgtccctcacagctgtcaacattaagactgcagagatttacagagcatcctttcaagatcggggtccggaggagcagcttcgtgctgcgcgaactttagcaggaggaccaatgattagcatttatgatgcagagacagaacaacttcgtataggaccgtactcctggacaccatttccacatgtggatttctggttgcaccaagatgacaagcaaatactagagaatctttccacttcgcctctggctgagccaccccactttgttgaacatattagatctaccttgatgtttttaaaaaaacacccatctccagctcacacactgttttctggaaataaagccctactctacaaaaaaaatgaagatggcttgtgggaaaagatctcttctccaggaagttaaaaaacatgaattaccaaagaaagcaccttcttggcctgacagaccattggtggggctggcacgaatccagatctggatcctacatctgttgggtcttaggcctccttccctcctcagtgtctttcaaatgactttcatcaaatgactttcaaaataaaaccttattttggcgcctgaagcacaataaacgggtactcttctctcggatggggccctaccctcaacgcaaagtcatcacctttaaccgctacagccatgatttcaacttccacatcaactacggcgacctgggcttcctggggcctgaagatcttcgggtatttggctcccagaatctgaccacagtgaagctaaaaggggtgggtgacagcttcaagaagtatcctgactacgagtccaagggcatcaaggctcacttcaacctggatgagagtggcgtgctcagtctagacagggtggagtctgtatttgagacactggtagaggacagcgcagaagaggaatctactctcaccaaacttggcaacaccatttccagcctgtttggaggcggtaccacaccagatgccaaggagaatggtactgatactgtccaggaggaagaggagagccctgcagaggggagcaaggacgagcctggggagcaggtggagctcaaggaggaagctgaggccccagtggaggatggctctcagcccccaccccctgaacctaagggagatgcaacccctgagggagaaaaggccacagaaaaagaaaatggggacaagtctgaggcccagaaaccaagtgagaaggcagaggcagggcctgagggcgtcgntccagccccagagggagagaagaagcagaagcccgccaggaagcggcgaatggtagaggagatcggggtggagctggttgttctggacctgcctgacttgccagaggataagctggctcagtcggtgcagaaacttcaggacttgacactccgagacctggagaagcaggaacgggaaaaagctgccaacagcttggaagcgttcatatttgagacccaggacaagctgtaccagcccgagtaccaggaagtgtccacagaggagcagcgtgaggagatctctgggaagctcagcgccgcatccacctggctggaggatgagggtgttgcagccaccacagtgatgttgaaggagaagctggctgagctgaggaagctgtgccaagggctgttttttcgggtagaggagcgcaagaagtggcccgaacggctgtctgccctcgataatctcctcaaccattccagcatgttcctcaagggggcccggctcatcccagagatggaccagatcttcactgaggtggagatgacaacgttagagaaagtcatcaatgagacctgggcctggaagaatgcaactctggccgagcaggctaagctgcccgccacagagaagcctgtgttgctctcaaaagacattgaagctaagatgatggccctggaccgagaggtgcagtatctgctcaataaggccaagtttaccaagccccggccccggcctaaggacaagaatgggacccgggcagagccacccctcaatgccagtgccagtgaccagggggagaaggtcatccctccagcaggccagactgaagatgcagagcccatttcagaacctgagaaagtagagactggatccgagccaggagacactgagcctttggagttaggaggtcctggagcagaacctgaacagaaagaacaatcgacaggacagaagcggcctttgaagaacgacgaactataacccccacctctgttttccccattcatctccacccccttcccccaccacttgtatttatttaacatcgagggttgggggaggggttggtcctgccctcggctggagttcctttctcacccctgtgatttggaggtgtggagaaggggaagggagggacagctcactggttccttctgcagtacctctgtggttaaaaatggaaactgttctcctccccagccccactccctgttccctacccatataggccctaaatttgggaaaaatcactattaatttctgaatcctttgcctgtgggtaggaagagaatggctgccagtggctgatgggtcccggtgatgggaagggtatcaggttgctggggagtttccactcttctctggtgattgttccttccctcccttcctctcccaccatgcgatgagcatcctttcaggccagtgtctgcagagcctcagttaccaggtttggtttctgagtgcctatctgtgctctttcctccctctgcgggcttctcttgctctgagcctcccttccccattcccatgcagctcctttccccctgggtttccttggcttcctgcagcaaattgggcagttctctgccccttgcctaaaagcctgtacctctggattggcggaagtaaatctggaaggattctcactcgtatttcccacccctagtggccagaggagggaggggcacagtgaagaagggagcccaccacctctccgaagaggaaagccacgtagagtggttggcatggggtgccagcatcgtgcaagcttctgtcataatctgcatcttcccagcagcctggtaccccaggttcctgtaactccctgcctcctcctctcttctgctgttctgctcctcccagacagagcctttccctcaccccctgaccccctgggctgaccaaaatgtgctttctactgtgagtccctatcccaagaatcctggggaaaggagagaccatggtgtgaatgtagagatgccacctccctctctctgaggcaggcctgtggatgaaggaggagggtcagggctggccttcctctgtgcatcactctgctaggttgggggcccccgacccaccatacctacgcctaaggagcccgtcctccagtattccgtctgtagcaggagctagggctgctgcctcagctccaagacaagaatgaacctggctgtgtcagtcattttgtcttttccttttttttttttttttgccacattggcagagatgggacctaagggtcccacccctcaccccacccccacctcttctgtatgtttgaattctttcagtagctgttgatgctggttggacaggtttgagtcaaattgtactttgctccattgttaattgagaaactgtttcaataaaatattcttttctacagttaaaaa

SEQ ID NO: 310 - DNA, 2074 bp; single-stranded, linear
  immediate source library: LIVRNOT01
  immediate source clone: 139332
accaccgtggcctgcgacgaaatggcgaaaagtcttttgaagacagcctctctgtctggaaggacaaaattgctacatcaaacaggattgtcactttatagtacatcccatggattttatgaggaagaagtgaaaaaaacacttcagcagtttcctggtggatccattgaccttcagaaggaagacaatggcattggcattcttactctgaacaatccaagtagaatgaatgccttttccaggtgttatgatgctacaacttctggaaaaagtaattgaattggaaaattggacagaggggaaaggcctcattgtccgtggggcaaaaaatactttctcttcaggatctgatctgaatgctgtgaaatcactaggaactccagaggatggaatggccgtatgcatgttcatgcaaaacancttaacaagatttatgagacttcctttaataagtgttgcgctggttcaaggttgggcattgggtggaggagcagaatttactacagcatgtgatttcaggttaatgactccagagagtaagatcagattcgtccacaaagagatgggcataataccaagctggggtggcaccacccggctagttgaaataatcggaagtagacaagctctcaaagtgttgagtggggcccttaaactggattcaaaaaatgctctaaacataggaatggttgaagaggtcttgcagtcttcagatgaaactaaatctctagaagaggcacaagaatggctaaagcaattcatccaagggccaccggaagtaattagagctttgaaaaaatctgtttgttcaggcagagagctatatttggaggaagcattacagaacgaaagagatcttttaggaacagtttggggtgggcctgcaaatttagaggctattgctaagaaaggaaaatttaataaataattggtttttcgtgtggatgtactccaagtaaagctccagtgactaatatgtataaatgttaaatgatattaaatatgaacatcagaattactttgaaggctactattaatatgcagacttacttttaatcatttgaatatctgaactcatttacctcatttcttgccaattactcacttgggtatttactgcgtaatctggaacatttagctaaaatatacacttttggcttaaaaattattgctgtcaattccaataataattcttagcttataaccaaagagcagtgtttaaaaggagagcttctatacaaaacctattcctggcgttacttttcatacaatttttgttctgttttacctggaaataatttaccaaaataactgagtgttgctgctaaagaacaaaagtggggaggtatcagggaacaagaaaacaagaaagggtatgatcaatcattttcttctgctccaaacagctggagtaaaattcatgggaaatggcccttcatttaaaaaaagatgtacctcactacccactacaaatttggaactttgttcttttcaataattagttttctattgtaaattacctactaaacagtggtagccatgacatggaaagtcaactgattctacaattggacattcatttgtgtgccctggaatttccaactagtaataaacaactactgttgatgtagttttaaaccacttgaagggactcatgaagcatcctgcaacataaatttgcatttttacatcagatttcttttttttcctgaaaaacaactaaccttctaacaactatctttcaaaagtaaatgtaataaaaatgcacaacataaaatgtttatgatcccagcaatacactttttaaaaaatgtgaaagtcaaagaattaagttctagttctgacctcatcacaagaggtcaaaagtatttgctactgtaacattcaattcacatttgagaatcatggtaaaaataacttgtatttgccttaccatcatgatcctactgttgagttaggaaaatatggttagacagactcacattactttttttcagaggtaaactctagattactgtgtcaacccaatactatttggccatagatgtaaaaactaccaaataaaagtggattt

SEQ ID NO: 311 - DNA, 561 bp; single-stranded, linear
  immediate source library: LIVRNOT01
  immediate source clone: 139645
ctgtctcaaaaaaattaaaattaaaattaaaaacaaataatcctgccttttacaggtgaaactcggggctgtccatagcggctgggaccccgtttcatccatccatgcttcctagtaacacacgatgggctttccttacccatgcccaaggtgtgccctccgtctggaatgccgttccctgtttcccagatctcttgaactctgggttctcccagccccttgtccttccttccagctgagccctggccacactggggctgcctttctctgactctgtcttccccaagtcagggggctctctgagtgcagggtctgatgctgagtcccacttagcttggggtcagaaccaaggggtttaataaataacccttgaaaactggttcggatganttggctttcattgtgttcctagcatcttctcaaatcaacttcccaggactccagggtgaaggaggaaaagaggcatggcccaggccctggggtgtgggatatggtctcctaggggatgacagttgggatcaatggcctgtnacttntcnnntccttccccatctgggccta

SEQ ID NO: 312 - DNA, 1926 bp; single-stranded, linear
  immediate source library: TLYMNOR01
  immediate source clone: 140055
ctcccggaggtcctcctgatgccctaggaagacgcgactcagaattgggcccaggagtgaaggccaagaagcccatccagactaagttccgaatgccactcttgaactgggtggcactgaaacccagccagatcaccggcactgtcttcacagagctcaatgatgagaaggtgctgcaggagctagacatgagtgattttgaggaacagttcaagaccaagtcccaaggccccagcctggacctcagcgctctcaagagtaaggcagcccagaaggcccccagcaaggcgacactcattgaggccaaccgggccaagaacttggccatcaccctgcggaagggcaacctgggggccgagcgcatctgccaagccattgaggcgtacgacctgcaggctctgggcctggacttcctggagctgctgatgcgcttcctgcccacagagtatgagcgcagctncatcacccgctttgagcggggagcagcggccaatggaggagctgtcagaggaggaccgcttcatgctatgcttcagccgcatcccgcgcctgccggagcgcatgaccacactcaccttcctgggcaacttcccggacacagcccagctgctcatgccgcaactgaatgccatcattgcagcctcaatgtccatcaagtcctctgacaaactccgccagatcctggagattgtcctggcctttggcaactacatgaacagtagcaagcgttggggcagcctatggcttccggctccagagcctggatgcgctgttggagatgaagtcgactgatcgcaagcagacgctgctgcactacctggtgaaggtcattgctgagaagtacccgcaactcacaggcttccacagcgacctgcacttcctggacaaggcggggctcagtgtccctggacagtgtcctggcggacgtgcgctccctgcagcgaggcctagagttgacacagagagagtttgtgcggcaggatgactgcatggtgctcaaggagttcctgagggccaactcgcccaccatggacaagctgctggcagacagcaagacggctcaggaggcctttgagtctgtggtggagtacttcggagagaaccccaagaccacatccccaggcctgttcttctccctctttagccgcttcattaaggcctacaagaaagctgagcaggaggtggaacagtggaaaaaagaagccgctgcccaggaggcaggcgctgataccccgggcaaaggggagcccccagcacccaagtcaccgccaaaggcccggcggccacagatggacctcatctctgagctgaaacggaggcagcagaaggagccactcatttatgagagcgaccgtgatggggccattgaagacatcatcacagatctgcggaaccagccctacatccgcgcagacacaggccgccgcagtgcccgtcggcgtcccccgggccccccactgcaggtcacctccgacctctcgctgtagccgctatttctgcaggtggattctgcaggggtgtggggccgtggacaggctgaggctcaaggaaggtggtcctcagctcggctggccgggcagcccctcctccgctgtggcccgcctcaaacgggctggtgcatcctcctcttggccacagagggcagcatcgcccgccccttcccccaaatgctgcttgcagcacccaccctaaagccccctccaaatagccatacttagcctcagcaggagcctggcctgtaacttataaagtgcacctcgcccccgcaagccccagccccgaggaccgtccatggaccttatttttatatgagattaataaagatgtttgcaaaaaaaanaannnnnaanctcggggcccgggcagtagaggaaattncggtagtngccctcgggcctcgncatgangggccgctttngcaccatt

SEQ ID NO: 313 - DNA, 650 bp; single-stranded, linear
  immediate source library: TLYMNOR01
  immediate source clone: 140290
gggcncccncttttgggggggnaagaattggcccctggggnnatttgttaaacccccncnttttngggcctccancctggggttttgtcccggggncttccctcctgggggtaannnattnggacctctaattgaggnaaaagngatttttnggaaattggaataaataaagcttttcccacaggaatgcctcattggattggagggaggggtttctggaactgctctggagacagaaagggggaacgcattctggccggaagggttggatagctctctcagtggggcaggttagggagatcagggcttaaaagattcaccctgatgaggttttgctctttcaatgaggaagctagctgtaaacatatcaggtaccaagagaagtcctgagatgttgaacatcagttttgggggcccccttgcaagagagaggaaggaaagatatagataggagccactcattcgctgcgatgcaagatgaccttaaaccttggtggaaaaaaaaaaagccctaagtgtcaccttgcaaatgtttagaaataaaccaaataacaagatttcctgaggccttacccgctatttgacttaccagctacttgaaagaagcaggttgattgattgccctgcttacaaaaaagaaaaaaanaaag

SEQ ID NO: 314 - DNA, 327 bp; single-stranded, linear
  immediate source library: TLYMNOR01
  immediate source clone: 140314
tttccatccatgtctctgttgtgtgtctgtgtgcgggtatgggtgggattcctggtggacaggggtgtcagatctgtctgaggagccccagtcatgctcagcacgctacagatgtgttgtttgtcacactgagattgctgaatgtcgtggctgttggctgccgagcctcagctgctggcatttccttctgctgtttgctgcttttgtgcctcccccactttccatcacctctggagtcccgtctggacgtcccttcctgctacaggaataatgaggcgtgggctgcctcccgctagggcctcctgctccctgtaggtagtttctggc

SEQ ID NO: 315 - DNA, 256 bp; single-stranded, linear
  immediate source library: TLYMNOR01
  immediate source clone: 140340
aaaggataggtttctaaaaatcttaatgttgttaaatgttggaaatctaagagtctttgggatattacgttatagtaaaatattttgtccaaggaagtcctgctttagtttcttatgaaacttatttattcccttgtatgaaggtccttataagactgtttgtgaatttgtatacatagtcatatatttaaaggtatacaagagtttatgttatagattttcattaaggtaagcttcttgctgcgttataantttt

SEQ ID NO: 316 - DNA, 534 bp; single-stranded, linear
  immediate source library: LATRTUT02
  immediate source clone: 1404269
ggcagccacagaaaagctggctttccggagcaccctgtggcagcggaaccactcagtaacagctgccagatttccaagganggcagaaagcagaaacagtccctaaagcaagaggaggaccgtcccaagagacgaggaccggcctatgtcatggaactgcccaaactaaagctttcgggagtggtcagactgtcgtcttactccagccccacgctgcagtccgtgcttggatctggaacaaatggaagagtgccggtgctgagacccttgaagtgcatccctgcgagcaagaagacagatccgcagaaggaccttaagcctgccccgcagcagtgtcgcctgcccaccatagtgcggaaaggcggaagattaactgagcagcaccgtcgtctcgacttcggaggcaacaccaagcccgaccgggccaggcctgggtgatctgctgctgagacgccacggagggctggggatgcgcctgcgtccgtttcgcgctggccggggctctgggtgctgccctgcgccctgccgcacccg

SEQ ID NO: 317 - DNA, 1275 bp; single-stranded, linear
  immediate source library: LATRTUT02
  immediate source clone: 1405467
gacaatcacaaggcaattctaaggaagactcccacgacactgcctaagaccaaggatttggggaaaattgattccactgatcactgaaaaaatttcttgccccaggtaactgtcggtggactttaatccaaggaacctggggggttcaatttaggtaggnccaaaactttcacaanctntttacaagttaaggnttacaataaaagggtaaaatttaggggtcccccttagggcgggcaaaggntccagcgggccgggggtgtggccacccgcgggctctcccgcctccctgcgcccttctggaaaatggaggctgctcgaggtttccgaggacttctctggcgcagaaagtcggggcagctggttcttctcggctgtaccctgagaatgctccctcctaggccagggccgcctctgcacacccttctttttttaaggagaccttggtgtcctgaaatcctggggttgcaagactgccagcctgtgtgatcaatcctgcggttaggaaggtggagttttgctttcccatcttttcctctgcctccggcatttggccctaaatgccagcgttttttgcttaggtatccagctcccgtccgcctgtgtgtggcggagctgctgggtaacggtgtcgaatagcaaaccttgggggctggcgggaggtggcttatcttgtgggtagatccctctcgagcagccgtatccacctctcggctctgcttatctctaagtcccacttgctttgaagcatatctctaggaatcgccccttctgcagtcaccgaagtgtcacctgaccttgcgcctaggggacctaatttatcttttatgtatcttactgtaagaggtgtggagtttggcctactaattgaacccccagttcttggataaagtccaccgacagttactgggcaagaaatttttcagtgatcagtggaatcaattttcccaaatcttggtcttaggcagtgtcgtgggagtcttccttagaattgccttgtgattgtccaaactatcccaagaataaatgtgttccaaatggatttgaaaacaggcctgtatttctgtgactgtcactgcctttcacaaacacttgactacatcaaatgtctaaaactgaaaatcaaatttttgtgatataactattataaaagtatgtttacatcaacatactgtccacatttgccaccttgcatgggggtttttaatttgtgtgtgtgtgtgagagacagagtttgntntgtcgcccagggtngagttcagtggnggattttgg

SEQ ID NO: 318 - DNA, 718 bp; single-stranded, linear
  immediate source library: LATRTUT02
  immediate source clone: 1406078
tcaagtatggccgcccctgccgtggtgggagcaccgccgcctggggcagaggggagtggcttcaccgggctgtgggacgggagccgggatgtctgtctcacagcagtttacctgggaaacagactctggggcaggacgttgcacgctggaggattccctgagagagctcgggacacctgacgggggtgggatggggcctgggcagggggaggctgtggagctgaagttcccaacccaggggagctgcagtggggtccccgatccctgagtccactggcccctgacaggctgcccctggggagggtgtcactttggattctttttggcgatgggctgttcccggtgagcgatccggctgtgagccgtcctcagcagacgctccaggctgcagggacattgagcgccttggtcccagcctgggtggcgactacagttgtctaccacacaactcaagggagaagagagatgggtgggtgggggtgtggggccgagcagggccggtgcccctcgcccacgtgcctcccgtggccgggtcgggcaggaagcagatcgacgtggccatcaaggtgctgaagcagggcacggagaaggcagacacggaaganatgatgcgcgaggcgcagatcatgcaccagctgganaacccctanatcgtgnggctnattggcgtctgnnaggccgaggccntnatgcnggtcatggagatggctgggngcgg

SEQ ID NO: 319 - DNA, 129 bp; single-stranded, linear
  immediate source library: TLYMNOR01
  immediate source clone: 140628
cttctccaggcccacacggggaacctcctaaccgctgagccctgaaaggtaggcgggtttaggatgagtggctacagggaggagaatggtgtggggagagagatatggaggaaagaatattaggggaca

SEQ ID NO: 320 - DNA, 184 bp; single-stranded, linear
  immediate source library: TLYMNOR01
  immediate source clone: 140652
gggttatatcttgtaggtcataggtgctcaataaaagccatctattattttaattattatgaaataataagaagggtacctatgatttaaaagctagatataagtacagacgctctttgacttacaatggggtcccatctctatcaacccatcgtaaggctgggcacagtggctcacgcctgta

SEQ ID NO: 321 - DNA, 231 bp; single-stranded, linear
  immediate source library: TLYMNOR01
  immediate source clone: 140693
cctggttctccagggaggtgaagaggagcaaggccagagctcagcagcagaagctgtggtttaagagagaggcttgattatagatgttaggaagtcaagagcccagtgcctagaacctgggctgcagacggggaatgaggcttatggctccgtaatggtgatgtaatgctgacacctcagctgtggcaccacagagtcctgtnttacccctccctntgcccacacaagatt

SEQ ID NO: 322 - DNA, 1290 bp; single-stranded, linear
  immediate source library: TLYMNOR01
  immediate source clone: 140704
tccttgctcggattgaacgtatggaaaggcggatgcagctggtaaagaaggataacgagaaagaaaggcacaagctgtttcagggctatgaaactgaagagagagaggaaacagagctatctgagaaaattaaactggagtgccagccggagctttccgagacatcccagactctgcctcccaagcccttctcatgtgggcggagtgggaaagggacataaaaggaaatccccatttggaagtacagaaagaaagactcctgttaaaaagctggctcctgaattttcaaaagtcaaaacaaaaactcctaagcactctcctattaaagaggaaccctgtggttccttatctgaaactgtttgtaaacgtgaattgaggagccaagaaaccccagaaaagccccggtcttcagtggacaccccaccaagactctccactccccaaaagggacccagcacccatcccaaggagaaagccttctcaagtgagatagaagatttgccgtacctttccaccacagaaatgtatttgtgtcgttggcaccagcctcccccatcaccgttaccattacgggaatcctctccaaagaaggaggagactgtagcaagtaaggcatagagaacacttgctcttataccctagtggtggcggtcaagctaacaagtgtgaaaatgcctttggcatttttaaaaaagtgcaatcaataaagcagagttctgtcaagaatgagtaagttaacagccagagacagacactgtgcaggcattgcaaatagatggaattacagcaaaatgtgctcaatgtatttgcctgcttacaacactgggagatgtgtttgccagtaagttgctcatcacaagagcaccagacttgggggtgtaatctccggcaacttgcatgccctctgaaagaagggttttctgtgctgtgaaatgcatagaactatactttgccatgcacgactgggtccctgcaattgatattgtgtgaaatctgggagggtggtctttgggtgttctcaggggccaatggtaatttttgggttggggagccagcttggggtggggaattttcacctgggcctccgctctttaactatataaacatttatctgtatatctatgtccctgtctggggggcaggaggaatctgccaaagaccaacagtcttactttatcttactatacttcacaaaggttctaaaatgtgaagagtttacttggattgcagtagcccattggttgttcatatatttaaataaaatggtctacaaactatttttcaaacaaa

SEQ ID NO: 323 - DNA, 74 bp; single-stranded, linear
  immediate source library: TLYMNOR01
  immediate source clone: 140809
aaacttcgtaagattttcattctctgtggtctgttatatgagagagatcctttaactagagcaaagagggagtt

SEQ ID NO: 324 - DNA, 1673 bp; single-stranded, linear
  immediate source library: TLYMNOR01
  immediate source clone: 141286
agaacagcatgatcagaaagtatgtgagagggagatgcagcgaatcactctgcccttgtctgccttcaccaaccccacctgtgagattgtggatgagaagactgtcgtggtccacaccagccagactccagttgaccctcaggagggcagcaccccccttatgggccaggccgggactcctggggcctgagcccccccagtgggcaggagcccatgcagacactggtgcaggacagcccaccctcctacagctaggaggaactaccactttgtgttctggttaaaaccctaccactcccccgcttttttggcgaatcctagtaagagtgacagaagcaggtggccctgtgggctgagggtaaggctgggtagggtcctaacagtgctccttgtccatcccttggagcagattttgtctgtggatggagacagtggcagctcccacagtgatgctgctgctaagggcttccaaacattgcctgcacccctggaactgaaccagggatagacggggagcttccccaggctcctctgtgctttactaagatggcctcagtctccactgtgggcttgagtggcatacactgttattcatggttaaggtaaagcaggtcaagggatggcattgaaaaaatatatttagtttttaaaatatttgggatggaactccctactgacctctgagaactggaaacgagtttgtacagaagtcagaactttgggttgggaatgagatctaggttgtggctgctggtatgcttcagcttgctggcaatggatgtgccttgacaaccgtgggccaggcctgggcccagggactcttcctgtttcataaggaaaggaagaattgcactgagcattccacttaggaagaggatagagaaggatctgctccgcctttggccacaggagcagaggcagacctggggatgccccagtttctcttcagggatggatagtgacctgtcttcattttgcacaggtaagagagtagttagctaacctatgggaattatactgtggggccttgtgagctgcttctaagaggctaacctggaaactaagctcagaggcaaggtaataaagcacttcaggaggnttgctccccaagtgggcctgatttagcaggtggtcctgcgggcgtccaggtcagcaccttcctgtagggcactggggctagggtcacagcccctaactcataaagcaatcaaagaaccattagaaagggctcattaagccttttggacacaggaccccagagaggaaaaagtgacttgcccaaggtcgtaagcaagctactggcatggcaagagcccagcttcctgacggagcgcaacatttctccactgcactgtgctagcagctcagcagggcctctaacctgtgatgtcacactcaaagaggccttggcaagcttctagccatagagcttcctttccagaacccttccactgcccaatgtggagacaggggttagtggggctttctatggagccatctgctttggggacctagacctcaggtggtctcttggtgttagtgatgctggagaagagaatattactggtttctacttttctataaaggcatttctctatatacatgttttatatacctcattctgacacctgcatatagtgtgggaaattgctctgcatttgacttaattaaaa

SEQ ID NO: 325 - DNA, 242 bp; single-stranded, linear
  immediate source library: TLYMNOR01
  immediate source clone: 141304
tgggtgccgctccaggctcctgccccttgcttgctgggtgaccctggacaaatctataacacctcgctttggctttcagtttcctcacccataaaacggggaccatcctagtatcacctaatgataggtgagttgcaaaggctggggcagatgacccagctccttccaccgtacctggcgcactgagacactcagtgaatattcatgcatgttactggaatcccagtgggccccgggtccag

SEQ ID NO: 326 - DNA, 245 bp; single-stranded, linear
  immediate source library: TLYMNOR01
  immediate source clone: 141389
ccgcctcccagcatgtacctggacttcctttgggtgccggcttttctgctggactaagagattcatggaaagaaccccagggcaaggtgaggagaagcagctggtacagactgatgacgaaggagaggaccagaaaagctgcttgggtgtggtggaagtttcagtgtaatgtgattcctagtaggcacatctgtgactcccttaaataaaaagggccagagatgaaaaaaaaaanaaaanaattg

SEQ ID NO: 327 - DNA, 356 bp; single-stranded, linear
  immediate source library: TLYMNOR01
  immediate source clone: 141399
gacagaggttnaagttaaaaggttgggtgtacttgaagactgtcgtcctggcagagcacgctgtctcaccagagccatggtgtcgcggtgcccccgtccccactggagggggcgtctcaggacgagtgggtgggtccacccaccctttttcatttcttcccccacttctcttgcgtacttccagctcactgtggagatgtttgattacatggattgtgagctgaagctttctgaatcaggtgagccgtaaagaggggatgcgggggtctgagtgtattgctaagtccccagagatgggacgagaagaaaaaagaagacatgagtgatcagaccaactgatcactatgaaatgaccc

SEQ ID NO: 328 - DNA, 187 bp; single-stranded, linear
  immediate source library: BRAINOT12
  immediate source clone: 1414094
gtgtacgagagcctggaagagttccacgtttttgtcctagcccatatattaagaaggcccatcgttgttgtggcagatacaatgttaagagactcaggtggagaagcgttcgcacccatcccattcggagggatctacctgcccttggaggtccctcccaacagatgccactgctcgcctctggttc

SEQ ID NO: 329 - DNA, 263 bp; single-stranded, linear
  immediate source library: TLYMNOR01
  immediate source clone: 141454
cggcacgacccaagatggagttgatgaggacagcttgtgccnaactgtcaggagcagcaagggtctttgtatcatatgatccctctgggctcagggcagtgcctgctgtggcttccccagacccaaggaggatgccacacagtataccattcagcgttggagtgagcgcccaagacaggctgggcagccaccgctactgccccttttcagagcagattggattcaaaggagattatttagccataaaaaggaatgaagggcca

SEQ ID NO: 330 - DNA, 1417 bp; single-stranded, linear
  immediate source library: TLYMNOR01
  immediate source clone: 141618
aataaatacaatgccataatcccttaggtttgcctagtgcttttgcaattttcaaagcacttccataagcattccttccacctccttgataggcatttatggaaagcctgctacatgtcaatcatactgttaggcacaggggacctaaagacacataaaaggatggcattctgcctcataaattgcaaaacctaatgaaagtgactgcttggtaaacaaattattattatattataaaatgctataaaagagccatattgaaagtgccctgttggagacagggcaaatgccacaaaaatgatgtaaatttacatggaggaaaagtagaatctgcctggtttgtaggcagcagaagacatttttcatcagtgggcaggtgttctttaccttttgtagaaatgggagtcaagtctcaaataggaggctccacaaaatctcatgccaggtctctgataccttattcacagaagttctttgaagtatttattgttattttctttgacttatgggaaaactgggacacaggaagacaggtaaattacccaacctcacacgttaagtcagaactgggagccataattttgtatccctggtataaatagacaatctctcgaagaaatgaagagatgaccatagaaaaacatcgagatatctccagctctaaaatcctttgtttcaatgttgtttggcatatgttatctttggaatttagtgtctgagcctctgtctgttactgtagtatttaaaatgcatgtattataatcatataatcataactgctgttaattcttgattatatacctagggacaatgtgtaatgtaagattactaattggttctgcccaatctcctttcagattttattaggaaaaaaaaataaacctcctgatcggagacaatgtattaatcagaagtgtaaactgccagttctatatagcatgaaatgaaaagacagctaatttggtcccacaaaccatgactgggtctagggcacccaggctgattcagctgatttcctaccagcctttgcctcttccttcaatgtggtttccatgggaatttgcttcagaaaagccaagtatgggctgttcagaggtgcacacctgcattttcttagctcttctagaggggctaagagacttggtacgggccaggaagaatatgtgggcagagctcctggaaatgatgcagattaggtggcatttttgtcagctctgtggtttattgttgggactattctttaaaatatccattgttcactacagtgaagatctctgatttaaccgtgtgctatccacatgcattacaaacatttcgcagagctgcttagtatataagcgtacaatgtatgtaataaccatctcatatttaattaaatggtatagaagaaaacaaaaannaaaaaactngagggggg

SEQ ID NO: 331 - DNA, 1199 bp; single-stranded, linear
  immediate source library: KIDNNOT09
  immediate source clone: 1418681
aaactgttttatttgcatttgaagaagctattggatacatgtgctgcccttttgttctggacaaagatggagtcagtgccgctgtcataagtgcagagttggctagcttcctagcaaccaagaatttgtctttgtctcagcaactaaaggccatttatgtggagtatggctaccatattactaaagcttcctattttatctgccatgatcaagaaaccattaagaaattatttgaaaacctcagaaactacgatggaaaaaataattatccaaaagcttgtggcaaatttgaaatttctgccattagggaccttacaactggctatgatgatagccaacctgataaaaaagctgttcttcccactagtaaaagcagccaaatgatcaccttcacctttgctaatggaggcgtggccaccatgcgcaccagtgggacagagcccaaaatcaagtactatgcagagctgtgtgccccacctgggaacagtgatcctgagcagctgaagaaggaactgaatgaactggtcagtgctattgaagaacattttttccagccacagaagtacaatctgcagccaaaagcagactaaaatagtccagccttgggtatacttgcatttacctacaattaagctgggtttaacttgttaagcaatatttttaagggccaaatgattcaaaacatcacaggtatttatgtgttttacaaagacctacattcctcattgtttcatgtttgacctttaaggtgaaaaaagaaaatggccaaacccaacaaactaacattcctactaaaaagttgagcttggacatattttgaatttttgtaagtgaagatttttaaactgactaacttaaaaaaatagattgtaattgatgtgccttaatttgcataaatcataaatgtatgtcctctctgtaattgttttaatgtgtgcttgaaatatccagaaaacctatggagttagtaaattctgggctgtcatatgtaggatagccactttttaggtatatgtacatttatatttctatcaattccttagaaagtaaaataaatgaatagatcaaatgttgtgttcatgtttggggaaaatataatttgcagaaacctatgaagtagagcaaagatgctttaaaaagataagtntnttttgaactaaatntttttnagtnctagtantgcacataggataattagt

SEQ ID NO: 332 - DNA, 1013 bp; single-stranded, linear
  immediate source library: KIDNNOT09
  immediate source clone: 1418802
tcgacgcgatgttcccacttaccccaagtacctgctctctccagagaccatcgaggccctgcggaagccgacctttgacgtctggctttgggagcccaatgagatgctgagctgcctggagcacatgtaccacgacctcgggctggtcagggacttcagcatcaaccctgtcaccctcaggaggtggctgttctgcgtccacgacaactacagaaacaaccccttccacaacttccggcactgcttctgcgtggcccagatgatgtacagcatggtctggctctgcagtctccaggagaagttctcacaaacggatatcctgatcctaatgacagcggccatctgccacgatctggaccatcccggctacaacaacacgtaccagatcaatgcccgcacagagctggcggtccgctacaatgacatctcaccgctggagaaccaccactgcgccgtggccttccagatcctcgccgagcctgagtgcaacatcttctccaacatcccacctgatgggttcaagcagatccgacagggaatgatcacattaatcttggccactgacatggcaagacatgcagaaattatggattctttcaaagagaaaatggagaattttgactacagcaacgaggagcacatgaccctgctgaagatgattttgataaaatgctgtgatatctctaacgaggtccgtccaatggaagtcgcagagccttgggtggactgtttattagaggaatattttatgcagagcgaccgtgagaagtcagaaggccttcctgtggcaccgttcatggaccgagacaaagtgaccaaggccacagcccagattgggttcatcaagtttgtcctgatcccaatgtttgaaacagtgaccaagntctnncccatggttgaggagancatnctgnagccactttgggaatcccgagancgntacgaggagctgaagcggatagatgacgccatgnaagagttacagnagaagantgacagctngacgtnngggg

SEQ ID NO: 333 - DNA, 1285 bp; single-stranded, linear
  immediate source library: KIDNNOT09
  immediate source clone: 1418874
cccaaccccatgtgcctgccgcctgccctccacacatccctgtccccccaacccgggaacccctgccctcctccagcaggccgcaccgcccctggggccccctgccagccccttcccaggctgggagacggcagaagagatagaatcagggctgcccccacagagtgggacccaaggggctaattggaggcacgaggggacccctccccagggccttttcctcctctgcgtcttccatctactgaaatgggagagggggtggggagcttctgttctggtgaagggacccgggcaggcccccagcaccccatgctgacttggagaaccccagatctctggggcccagccaggcagggtgtgggggcagctgtgccaatctacctcacaggcccaccccctgccgggcatgccgtgggatcatgggcagggaaggctctgggggtcggagacaccgctgcttagcacccccagccagaacaccctgagggtctcggggctctggagagagtggggcgggaggaagaattggcaccttcctagggaaggagacgagcgcttcgccttgattctccgagaagcctccgagaagtgctttaagtgtgtttgcatgcgccaggcggtgggcagcgggggcctgtccagccctctcccgccatccttccccaagtgaacgtccactgccttgtcaccagcgacctgcctgtcatgcccaccccctgaggaagcatggggaccctaacaccctgtgtgccctgcaccagacaggccgtggtcaggcccaggccaccggccgggttctgccacagcttcccacgtgcttgctgacatgcgtgtgcctgtgtgtggtgtctgttgctgtgtcgtgaaactgtgaccatcactcagtccaaacaagtgagtggccctcgaggccacagttatgcaactttcagtgtgtgtcataacgacgtcactgctttttaaactcgataactctttattttagtaaaatgcccaggagtcctggaagctacgggggacttgcagaggttttattttttggccttagaatcttcagaaaattaggaggcaccgagcccagcgcagcagcctcggacccggattgcgtttgccttagcggatatgtttatacagatgaatataaaatgtttttttctttgggctttttgcttcttttttcccccccttctcaccttcccttctccccgaccccaccccccaaaaaagctacttcttcattccgtggtacgattattttttttaactaaaggaagntaaaattcta

SEQ ID NO: 334 - DNA, 226 bp; single-stranded, linear
  immediate source library: KIDNNOT09
  immediate source clone: 1419118
ggaagangaggagggcgccggggccaccttgtccagggggcctgccttccccggcatgggctctgaggagttgcgtctggcctccttctatnactggccgctgactgctgaggtgccacccgagctgctggctgctgccggcttcttccacacaggccatcaggacaaggtgaggtgcttcttctgctatgggggcctgcagagctggaagcgcggggacgacccc

SEQ ID NO: 335 - DNA, 126 bp; single-stranded, linear
  immediate source library: TLYMNOR01
  immediate source clone: 142456
acaaaaggactcccttgtagcacttcaatacctttcttatccttttctctacccctaaaggagatacgataccatgacctatttcacaggattgtgtaaagaattaaaccgtcgtgtataaacata

SEQ ID NO: 336 - DNA, 3388 bp; single-stranded, linear
  immediate source library: BEPINON01
  immediate source clone: 1425434
ctcatggaatttctcacgttaaatttgatgatctcaatccagaagctgttgaagtcttgttgaattatgcctacactgctcagttgaaagnagataaggnattggtaaaagatgtttattctgcagcaaaaaagctgaagatggatcgagtaaagcaggtttgtggtgattatttactgtctagaatggatgttaacagctgcatcttttaccgaaattttgcaagttgtatgggagactcccgtttgttgaataaggttgatgcttatattcaggagcatttgttacaaatttctgaagaggaggagtttcttaagcttccaaggctaaagttggaggtaatgcttgaagataatgtttgcttgcccagcaatggcaaattatatacaaaggtaatcaactgggtgcagcgtagattctgggagaatggagacagtctggaagagctgatggaagaggttcaaaccttgtactactcagctgatcacaagctgcttgatgggaacctactagatggacaggctgaggtgtttggcagtgatgatgaccacattcagtttgtgcagaaaaagccaccacgtgagaatggccataagcagataagtagcagttcaactggatgtctctcttctccaaatgctacagtacaaagccctaagcatgagtggaaaatcgttgcttcagaaaagacttcaaataacacttacttgtgcctggctgtgctggatggtatattctgtgtcatttttcttcatgggagaaacagcccacagagctcaccaacaagtactccaaaactaagtaagagtttaagctttgagatgcaacaagatgagctaatcgaaaagcccatgtctcctatgcagtacgcacgatctggtctgggaacagcagagatgaatggcaaactcatagctgcaggtggctataacagagaggaatgtcttcgaacagtcgaatgctataatccacatacagatcactggtcctttcttgctcccatgagggacaccaagagcccgatttcaaatggctgtactcatgggccagctctatgtggtaggtggatcaaatggccactcagatgacctgagttgtggagagatgtatgattcaaacatagatgactggattcctgttccagaattgagaactaaccgttgtaatgcaggagtgtgtgctctgaatggaaagttatacatcgttggtggctctgcatccatatggtcaaaaaggactgaaaaattgtgatgtatttgatcctgtaacaaagttgtggacaagctgtgcccctcttaacattcggagacaccagtctgcagtctgtgagcttggtggttatttgtacataatcggaggtgcagaatcttggaattgtctgaacacagtagaacgatacaatcctgaaaataatacctggactttaattgcacccatgaatgtggctaggcgaggagctggagtggctgttcttaatggaaaactgtttgtatgtggtggctttgatggttctcatgccatcagttgtgtggaaatgtatgatccaactagaaatgaatggaagatgatgggaaatatgaaccttttcaccaaggagcaatgctgggattgcaactgtagggaacaaccatttatgcagtgggaggattcgatggcaatgaatttctgaatacggtggaagtctataaccttgagtcaaatgaaatggagccccctatacaaaggtttttccagttttaacaaatttaagaccctctcaaactaacaggcttagtgatgtaattatggttagcagaggtacacttgtgaataaagagggtgggtgggtatagatgttgctaacagcaacacaaagcttttgcatattgcatactattgaaacatgctgtacatactttttgggtttatttgggaaaggaatgcaaagatgaaggtctgttttgtgtacttttaagactttggttattttactttttggaaaagaataaaccaagaattgattggggacatcatttcaagaagtcccctctcctccacatttgttttgccaatttgcacattaaatgactcttccctcaaatgtgtactatggggtaaaaggggtagggtttaaagatgtagacagttgggttttttaagggccctttttcaataactggaacactctataacaaaggatacttatttaaatagatgacattgactatttttgtttttattaaaaggaagcttacatgcctaccaatatttaatcttttatgattgcctttttataactttttatattctcagcagagtgctttaccaattgaagtaaaatgtggcaggctggagttattgaagcagagtggcagtcttcagtttgcagagtaggggtctgtcttttaaactctgagtgcaaacttcagagttcttgccttggctgcagtttttttccctcaaggaatgcagtactaacatttatttgagtggagttactgaacagtaacatagctgtgatttttggtatttgaaacactggttttaaatattttgacttgttgagggtatgttttatatagcaagacattatatagcagtaaaaaaatggtgttttatcttctatataattcccgtttttattattaacaaaacagtcctaaatagcagccctcaattgtgaaaaaatttactttaaactacattaggttgtgaatgcaggttttatcagaactatgtttttgttcagtttatctgttcatatggataaatattggttgggatgacttggtgtctaatgtgtagtgctacacacctaacttatggggccaaaatagcatgtcctaatgcttgctgctgatttaaacacattaaaggtactttgcaggaaatccttgcaccatgggattaatatccaattgctgcttgtacactcattcattactaaaagttttgagaaatttttttttccagtaatgagcttaagaaatttgtggaaaataactcacctgggcatcttacatctgaaataaggaatgatataaggtttttttttctcacagaagatgaagcacacaggaacctaatgggccaactgggatgaggtgactattctgagatgactattcagtggctaacttgggttaggaagaaaataattaggtattttctccaaatgttcactggtactctgccactttatttctctcatctgttacacaaagaaccaccaggaaagcaaatcagtttggttggtaactctgtaattcctaactatcactggtttggttctggactaaaactacattgacagattgaatttgcctaatatgatgactgtttttaatatggatctgtatgtgttctattcagcacaaggaaataaaattttagttgaggattcagcact

SEQ ID NO: 337 - DNA, 2081 bp; single-stranded, linear
  immediate source library: SINTBST01
  immediate source clone: 1427866
accccctgtctgattacaatgtgtggagcatgctaaagcctataaatacaactgggacattaaagcctgacgacagggttgtggttgctgccacccggctggatagtcgttcctttttctggaatgtggccccaggggctgaaagcgcagtggcttcctttgtcacccagctggctgctgctgaagctttgcaaaaggcacctgatgtgaccaccctgccccgcaatgtcatgtttgtcttctttcaaggggaaacttttgactacattggcagctcgaggatggtctacgatatggagaagggcaagtttcccgtgcagttagagaatgttgactcatttgtggagctgggacaggtggccttaagaacttcattagagctttggatgcacacagatcctgtttctcagaaaaatgagtctgtacggaaccaggtggaggatctcctggccacattggagaagagtggtgctggtgtccctgctgtcatcctcaggaggccaaatcagtcccagcctctcccaccatcttccctgcagcgatttcttcgagctcgaaacatctctggcgttgttctggctgaccactctggtgccttccataacaaatattaccagagtatttacgacactgctgagaacattaatgtgagctatcccgaatggctgagccctgaagaggacctgaactttgtaacagacactgccaaggccctggcagatgtggccacggtgctgggacgtgctctgtatgagcttgcaggaggaaccaacttcagcgacacagttcaggctgatccccaaacggttacccgcctgctctatgggttcctgattaaagccaacaactcatggttccagtctatcctcaggcaggacctaaggtcctacttgggtgacgggcctcttcaacattacatcgctgtctccagccccaccaacaccacttatgttgtacagtatgccttggcaaatttgactggcacagtggtcaacctcacccgagagcagtgccaggatccaagtaaagtcccaagtgaaaacaaggatctgtatgagtactcatgggtccagggccctttgcattctaatgagacggaccgactcccccggtgtgtgcgttctactgcacgattagccagggccttgtctcctgcctttgaactgagtcagtggagctctactgaattactctacatggactgagagccgctggaaagatatccgtgcccggatatttctcatcgccagcaaagagcttgagttgatcaacctgacagtgggcttcggcatcctcatcttctccctcatcgtcacctactgcatcaatgccaaagctgatgtccttttcattgctccccgggagccaggagctgtgtcatactgaggaggaccccagcttttcttgccagctcagcagttcacttcctagagcatctgtcccactgggacacaaccactaatttgtcactggaacctccctgggcctgtctcagattgggattaacataaaagagtggaactatccaaaagagacagggagaaataaataaattgcctcccttcctccgctcccctttcccatcaccccttccccatttcctcttccttctctactcatgccagattttgggattacaaatagaagcttcttgctcctgtttaactccctagttacccaccctaatttgcccttcaggacccttctactttttccttcctgccctgtacctctctctgctcctcacccccacccctgtacccagccaccttcctgactgggaaggacataaaaggtttaatgtccagggtcaaactacattgagcccctgaggacaggggcatctctgggctgagcctactgtctccttcccactgtcctttctccaggccctcagatggcacattagggtgggcgtgctgcgggtgggtatcccacctccagcccacagtgctcagttgtactttttattaagctgtaatatctatttttgtttttgtctttttcctttattctttttgtaaatatatatataatgagtttcattaaaatagattatcccacaaaaaaaaaannaaaaa

SEQ ID NO: 338 - DNA, 3408 bp; single-stranded, linear
  immediate source library: SINTBST01
  immediate source clone: 1429970
ggaagacctgtcacagttttatcatcaatgagaagatgaatgggaaagtgtgggaccttttccccgaggctgacaaagtccgcaccatgctggttaggaagatccaggnagagtcactgaggacctacctcttcacctacagcagtgtctatgactccatcagcatggagacgntgtcagacatgtttgagctggatctgcccactgtgcactncatcatcagcaaaatgatcattaatgaggagctgatgggcttcctgggaccagcaacacagacagtggtgatggacggaatgaggccaatgnccaggagaaactgggtttgnagntgggngagaaggtnggnagnctggtggagaagaagnaagggtgtttgancanaaggactcgagccgcgtttccgctgtcagggccctgcggtgtgaactngcgggctcagctggtccggccgtagcacctccgcgccgtcgccatgtcgcggtttttcaccaccggttcggacagcgagtccgagtcgtccttgtccggggaggagctcgtcaccaaacctgtcggaggcaactatggcaaacagccattgttgctgagcgaggatgaagaagataccaagagagttgtccgcagtgccaaggacaagaggtttgaggagctgaccaaccttatccggaccatccgtaatgccatgaagattcgtgatgtcaccaagtgcctggaagagtttgagctcctgggaaaagcatatgggaaggccaaaagcattgtggacaaagaaggtgtcccccggttctatatccgcatcctggctgacctagaggactatcttaatgagctttgggaagataaggaaggnnnnnnnnnnnnnnnnnnnnncaatgccaaggctctgagcaccttgcgtcagaagatccgaaaatacaaccgtgatttcgagtcccatatcacaagctacaagcagaaccccgagcagtctgcggatgaagatgctgagaaaaatgaggaggattcagaaggctcttcagatgaggatgaggatgaggacggagtcagtgctgcaactttcttgaagaagaaatcagaagctccttctggggagagtcgcaagttcctcaaaaagatggatgatgaagatgaggactcagaagattccgaagatgatgaagactgggacacaggttccacatcttccgattccgactcagaggaggaagaagggaaacaaaccgcgctggcctccaagatttcttaaaaaggcacccaccacagatgaggacaagaaggcagccgagaagaaacgggaggacaaagctaagaagaagcacgacaggaaatccaagcgcctnnnnnnnnnnnnnnnnnncaatgaaggcggggagtgggaaagggtccggggcggagtgccgttggttaaggagaagccaaaaatgtttgccaagggaactgagatcacccatgctgttgttatcaagaaactgaatgagatcctacaggcacgaggcaagaagggaactgatcgtgctgcccagattgagctgctgcaactgctggttcagattgcagcggaaaacaacctgggagagggcgtcattgtcaagatcaagttcaatatcatcgcctctctctatgactacaaccccaacctggcaacctacatgaagccagagatgtgggggaagtgcctggactgcatcaatgagctgatggatatcctgtttgcaaatcccaacatttttgttggagagaatattctggaagagagtgagaacctgcacaacgctgaccagccactgcgtgtccgtggctgcatcctaactctggtggaacgaatggatgaagaatttaccaaaataatgcaaaatactgaccctcactcccaagagtacgtggagcacttgaaggatgaggcccaggtgtgtgccatcatcgagccgtgtgcagcgctacctggaggagaagggcactaaacccgaggaggtctgccgcatctacctgctgcgcatccctgcacacctactacaagtttgatttacnaaggcccatccagcggacagtgacccccgcctgagggctcctcaaaagtctgagcaagaccaggcagaaaatgagggcgaggactcggctgtgttgatggagagactgtgcaagtacatctacgccaaggaccgcacagaccggatccgcacatgtgccatcctctgccacatctaccaccatgctctgcactcgcgctggtaccaggcccgcgacctcatgctcatgagccacttgcaggacaacattcagcatgcagacccgccagtgccagatcctttacaaccgcaccatggtgcagctgggcatctttcccttccgccaaggcctgaccaaggacgcacacaacgccctgctggacatccagtcgagtggccgagccaaggagcttctgggccagggcctgctgctgcgcagcctggcaggagcgcaaccaggagcaggagaaggtggagcggcgccgtcaggtccccttccacctgcacatcaacctgggagctgctggagtgtgtctacctggtgtctgccatgctcctgggagatcccctacatggccgcccatggagagcgatgcccgccgacgcatgatcagcaagcagttccaccaccagctgcgcgtgggcgagcgacagcccctgctgggtccccctgagtccatgcgggaacatgtggtcgctgcctccaaggccatgaagatgggtgactggaagacctgtcacagttttatcatcaatgagaagatgaatgggaaagtgtgggnaccttttccccgaggctggactaantccgcaccatgctggttaggaagatccaggaagagtcactgaggacctacctctttcacctacagcagtgtctatgactccatcagcatggagacgctgtcagacatgtttgagctggatctgcccactgtgcactccatcatcagcaaaatgatcattaatgaggagctgatggccttcctgggaccagccaacacagacagtggtgatgcaccgcactgagcccacatgcccagcagaacctggctctgcagctggccgagaagctgggcagcctgggtggagaacaacgaacgggtgtttgaccacaagcagggcacctacgggggctacttccgagaccagaaggacggctaccgcaaaaacgagggctacatgcgccgcggtggctaccgcccagcagcagtctcagacggcctactgagctctccactctgtttcccgcctgggccatccaaccttgaagtcctaaaccacacctcagtcactaaaaggtctgtttaaaaggtgttcttggttnattngctttgttgcatanangtnttttttnagccattcatttncttgnttatattttttnagctggnccatattg

SEQ ID NO: 339 - DNA, 1768 bp; single-stranded, linear
  immediate source library: TLYMNOR01
  immediate source clone: 143092
cggctcgagcgtttgcagtcagtccggtgtttgcaaatattgtgtgggctccgcgcgctgcgggctgcgggagggtccggccgggcgtctctgcgagcctggagtttgcatgaaactttcacctgcgctccggggagactttcggctccggctcccaccgcgcgcctcgccgccctcgcgaccgcgggctccgtccaacccggcccgacatggacgtgctccccatgtgcagcatcttccaggagctccagatcgtgcacgagaccggctacttctcggcgctgccgtctctggaggagtactggcaacagacctgcctagagctggaacgttacctccagagcgagccctgctatgtttcagcctcagaaatcaaatttgacagccaggaagatctgtggaccaaaatcattctggctcgggagaaaaaggaggaatccgaactgaagatatcttccagtcctccagaggacactctcatcagcccgagcttttgttacaacttagagaccaacagcctgaactcagatgtcagcagcgaatcctctgacagctccgaggaactttctcccacggccaagtttacctccgaccccattggcgaagttttggtcagctcgggaaaattgagctcctctgtcacctccacgcctccatcttctccggaactgagcagggaaccttctcaactgtggggttgcgtgcccggggagctgccctcgccagggaaggtgcgcacggggacttcggggaagccaggtgacaagggaaatggcgatgcctcccccgacggcaggaggagggtgcaccggtgccactttaacggctgcaaggaaagtttacaccaaaagctcccacttgaaagcacaccagcggacgcacacaggagaaaagccttacagatgctcatgggaagggtgtgagtggcgttttgcaagaagtgatgagttaaccaggcacttccgaaagcacaccggggccaagccttttaaatgctcccactgtgacaggtgtttttccaggtctgaccacctggccctgcacatgaagaggcacctctgagggagcagagaggtggatcctgtaggctaaaaggcttccaggctgagagccggccgtggaaggagggatgcgtgttccagccaaagcatgccgttctgcaccctacccagttgcctccagggcctctccttggaaggtcttttgagggctaaaaaggtcctgtaagaagcggcatagcacccgtggtgcatggtatgtgggtgaccctggactcgccactggtacccgcccttccgagcggcgcctaagcctttgccgtgagcatgcacactgagaatgctaatggttgggttgattgtatgttgaggatctattactgaccgtatgatgaggccaactttttttccttgtggttagcaagactgcaagagatggaaaaaaagtagtttgaatgttttgtgtgtaaggagtataccatgagatgagatgaccaccaatcatttccttggggggagggggtgtctgcaccttagaaaaaaaaaagaaaaatcaaaaaaacaaaaaaacaaaaacaaaaaaaggaggaaaatnttngagggtnggcgtnggnactnaggnccccanagttgcgngtngttttgggagggagagcccntntnccccttttctntnttagagggactcttagtgtcttgtncaactnttaaatttncaaatgttnaagtagntttttttncancntncnaaatagctnanttntnaaccc

SEQ ID NO: 340 - DNA, 2088 bp; single-stranded, linear
  immediate source library: TLYMNOR01
  immediate source clone: 143157
tctccgttgcatgcctgtggctgtaccatccgaattctttggtgggatttgctggtggcgagtgtgagagtgcagacgtgcacttgtcgcctgccacgcgagggggacctgggcgctgttcctgttgtgtgtccccatgtctgccgttgctgtgcatgttgaagctgccgcccctgttgtcctcccgccctctctggggtggggtcggggctnctnctccttctnctccaccagtgtcgctggctgggagctcaaatggtgtcagcttctcaggtgtcaccttggtgtcctcgtggccaactggctgcctgtggtttggcacacagtgcctgcgctggctcaacactgaagcccgagcttcctggggcggctctgtccccacggctgcggcacagtgaggttgaacttgactgtcttttggtccccagagctagagccggtgcaggccacgcagaacaagacagggaagtatgtgccgccgagcctgcgcgacggggccagccgccgcggggagttcatgcagcccaaccgaagagccgacganaacgncaccatccgtgtnaccaatttttaagnggananggtgagacccccctggttagcaataagtatacttagaacagcttgctgtgcacttaattgtaacataccccatgccaagcaccttgcacgagtttttctcattcagtctccttaggagcccagggaggcaggaagcttttgtggttcccgttttataagggaggaagctgaggctcaggttgtctagctcaagggcccggagtctaggtggacccctgcacatccctgagtattgcgccctggtgggagctggtccgccagactgcgcaggccccacgctgtgtagtgtcacctggacccggangctgacagctgccctgcctcctggagtcaggcctggcgtgtatcaggaaacaactgtcgccaggactcccgcttccgctctctggccgggcttgggctgcgtggaggaaatactttttgccgatgcctactggaggactttgattcgaaagccccccagttgggcccgaccccaggtggaggagggagggggaggacgacaaatgtgtcaccagcggagctcctcaaggggatccctctggccacaggttgacaccagcccagagccagagctactgccgggagctccactgccgcctcccaaggaggtcatcaacggaaaacataaagacagtgacagagtacaagatagatgaggatggcaagaagttcaagattgtccgcaccttcaggattgagacccggaaggcttcaaaggctgtcgcaaggaggaagaactggaagaagttcgggaactcagagtttgacccccccgggacccaatgtgggccaccaccactgtcagtgacgatgtctctatgacgttcatcaccagcaaagaggacctgaactgccaggaggaggaggaccctatgaacaaactcaagggccagaagatcgtgtcctgccgcatctgcaagggcgaccactggaccacccgctgcccctacaaggatacgctggggcccatgcagaaggagctggccgagcagctgggcctgtctactggcgagaaggagaagctgccgggagagctagagccggtgcaggccacgcagaacaagacagggaagtatgtgccgccgagcctgcgcgacggggccagccgccgcggggagtccatgcagcccaaccgcagagccgacgacaacgccaccatccgtgtcaccaacttgtcagaggacacgcgtgagaccgacctgcaggagctcttccggcctttcggctccatctcccgcatctacctgggttaaggacaagaccactggccaatccaagggcttcgcctttcatcagcttcccaccgccgcgaggatgctgcgcgtgccattgccggggtgtccggctttggctacgaaccacctcatcctcaacgtcgagtgggccaagccgtccaccaactaagccagctgccaccgtgtactcggtccgggacccttggcgacagaagacagcctccgagagcgcgggctccaagggcaataaagcagctccactctctct

SEQ ID NO: 341 - DNA, 6005 bp; single-stranded, linear
  immediate source library: BEPINON01
  immediate source clone: 1432736
gggctgcccccggggggctggcggactgggccgcgggggccccggggccggcggtgccggggtcatcgggatgatgcggacgcagtgtctgctggggctgcgcacgttcgtggccttcgccgccaagctctggagcttcttcatttaccttttgcggaggcagatccgcacggtaattcagtaccaaactgttcgatatgatatcctccccttatctcctgtgtcccggaatcggctagcccaggtgaagaggaagatcctggtgctggatctggatgagacacttattcactcccaccatgatggggtcctgaggcccacagtccggcctggtacggctcctgacttcatcctcaaggtggtaatagacaaacatcctgtccggttttttgtacataagaggccccatgtggatttcttcctggaagtggtgagccagtggtacgagctggtggtgtttacagcaagcatggagatctatggctctgctgtggcagataaactggacaatagcagaagcattcttaagaggagatattaccagacagcactgcactttggagttgggcagctacatcaaggacctctctgtggtccacagtgacctctccagcattgtgatcctgggtaactccccaggggcttacaggagccatccagacaatgccatccccatcaaatcctggttcagtgaccccagcgacacagcccttctcaacctgctcccaatgctggatgccctcaggttcaccgctgattgttcgttccgtgctgagccgaaaccttcaccaacatcggctctggtgacagctgctccccctccacctgagttggggtgggggggaaagggagggcgagcccttgggatgccgtctgatgccctgtccaatgtgaggactgcctgggcagggtctgcccctcccacccctctctgccctgggagccctacactccacttggggagtctggatggacacatgggccaggggctctgaagcagcctcactcttaacttcgtgttcacactccatggaaaccccagactgggacacaggcggaagcctaggagagccgaatcagtgtttgtgaagaggcaggactggccagagtgacagacatacggtgatccaggaggctcaaagagaagccaagtcagctttgttgtgatttgattttttttaaaaaactcttgtacaaaactgatctaattcttcactcctgctccaagggctgggctgtgggtgggatactgggattttgggccactgggattttccctaaatttgttcccccctttactctccctctgatttttctctccttagactccctcagacctgtaaccagctttgtgtcttttttccttttctctcttttaaaccatgcattataactttgaaaccaccaaaaaagccgttcaatagtattattgagcatctgtcagtggtattcccatgttacaacagcactgagcttgctggttttattaaaaaagtgcgaacaanaaacaagaactcactctcaggattgagtattgatgaaattgtccaaagagtgacagaacacattctagatgaacagaaaaagaaaaagccaaacccaggaaaggacaagaggacttatgagcccagctctgccacccccgtgaccaggtcctcccagggctcaccctcggtggttgttgcaccatcacccaaaaccaaggggcagaaagcagaagatgtccctgtgaggattgcactgggtgcaagttcctgtgaaatatgccacgaggtgttcaaatcaaaaaacgtgcgtgtgctcaaatgtgggcacaagtatcacaaagggtgctttaagcagtggcttaaagggcagagcgcttgcccggcctgccagggtcgtgatctcctgacagaagagtcaccttctggaagaggctggcccagtcagaatcaggagctgccttcctgctcttctaggtagtcacacttcactaaagtgtcatccaccagtgtgttgaatccgaagaatgacaattttctaccactggtgtaaaaaacaaacatttgaagacccttgtgcattgtgtgtcacaaagctaaatacatggaaatcgttaatatcgttgatattaagtaatttccccactctgagtgaatactttgatgattgccaacagtggctaataaaatgacggctaccacactcatgggtcactggggctgcgcagggctctttgaggtgggtggcttcttttggaaagtactatgaacgtctcgaagcagtattctagtgataagaattcttaacatagccaagcgccccacgtttgttccccacgtttgttccccttttctgtttgaaaaacctgttctggtagctccacaagagagatgatactgactntnttnttctttaaattttttacaagagtctgtattcctgatatgcctatatttttcctcaaagattctgcattttaaggatgggcataagcaaactatattttaataatttatagttaatgttaaaatattggctgatttagaccaaaagattcaaatctcctctttgtgaaatcccatctgcatttgattttttattattttatgttcccccgttagattgttttaagtgtttgcttttcatcttttatagatgtaatctgattttcaaaaatcattaacactttttaattagtatcgactaagactttttccccctggggatcgaggctgtgtgtccgtcatcccagcccccggttggagcctgctctttgaactccgctgcgctcctcagcagctttctgtcctcttctgtgagtcagtcagcgagtgcttgggatccgcatccagccgtgctgagcacacaacaggctgtgtgtggaaatggccaccaccattctccttccccaccccaccacaaaaagagaagctgtgtctttagacaaccctgaggtatctgtgttacaatcgttctgtgtttgatatttgtgtaaagtatgcatgcagtcttgtactgtgacctaagaacaaaactgtaactgcattagaaaccatgaaaaaattagatattgttttgtgacttttagacagtggtaaatatagaaccatgaattctggtcacattccatttctctccaacatgaaggatcaaaaaatgtttttcaatgtgttctttgttccactggaaacttagagtcatgagtttatgagctgatttggtcaccttcctctgcctttgttcactgtgagttctgatgtcttagtgacttagttcttagaagctcacgccttagtttgaaacagattctccacggtggtccccaaaacactgtctgcatatccataagaattgagcgctatgggtgttaacgtgcatgaggatcagtttgcagcagcaagtacaaaaggagaagaggaacatccgttgaatgagtgtgttttgtacataacttcagatacttgtgaacatgccttatatttgtccaacaactgtcagaataaagaacattctaaaatgaaaatcttggggaagagaagttgcccaaaccctgggataacgagtggggtgatctttccaggaaaaacatgtgtaacatctgcttatcactccagctccctcctcctcctnctctncacgttcccttgagtaaatgtctgggaaagcatgaagcttgatgcaagaaccctgttgtactggcgttttcctcccctgtgaaaacgtaactactgttgggagtgaattgaggatgtagaaaggtggtggaaccaaattgtggtcaatggaaataggagaatatggttctcactcttgagaaaaaaacctaagattagcccaggtagttgcctgtaacttcagtttttctgcctgggtttgatatagtttagggttggggttagattaagatctaaattacatcaggacaaagagacagactattaactccacagttaattaaggacgtatgttccatgtttatttgttaaagcagtgtgaatagccttcaagcatgtgaataatcttccatcttccccgccnnnnnnnnnnnnnnnnnnnttttgtttctttcaggtagacaccttttaaaatgcagaactaactgaggcatttcagtaactttgctttcaaatcaataaagtcaaatgtatggaaacattttgtgccctactctccataccctgtgtactcaaattctctactgtatgaattatgctttaagtagaattcagtgccaaggagaacttggtgaaataaattattttaatttttttttttatcctttacaaagccatggattttatttggttgatgtgtgctctgtacacaagccatttcaataggatggagctgttaattattttccaaagagtaatagacatgcaaaagtttcaataaaaactgggccattaacaaataaattaataaactaataagcattcccttctaggtttttgccaaactgcctatccaataacaaatttgagaatcgttgaaaaagctagttatatttcagagaaatgattttcattattgaaactgttctccctagcaggccattttccctttttcctgggagtttagcaagtttaggagagaatagtcatgaaaagaaagggaagaaaggggagaagggaagaggttaaaaagtaagtgctcagacctatgaacgtaatccctttgctagaaatatttaagagcagctcagcttggttgaaactgagttttgtcatcttccatatttgcaggaaggtattttctgacttgcaatgcagctagatgtaaaattttattttatcatcctagaaagccttgactagaaaaatgaataaatattgagggtttcctgtccatatctggcttgcatgtgccagaaagcagagaataagaaaatgtaatctccaacatccaagcatcgaaacccaaggggtaggcaattctatgtaggttttggacatggaagtttggtgcatcttggtttatgctggctcaactgctattaaacctctctggcttatagtctcttcattctattagacaagcacgtatcgaacacttgcttcgcacaaggctctttagttaacaatttagcagctactgtttgtgttaaacacacttttcacccaaagaggttctgaggcaaacgagagcaatgactatttaaagaaaggctttcccagcatcacttacacatcccaaaactaaaaagatcaactcttccaactgaggaaaggactcctggctttgaatggganacacttacagcagagagtcacaggccacggcaacaacaacgacaacaacaaacatttggaatattattctcaactcacgttttaataatacatcttattatttttctagtagagaaactacaaatcagcctcttcaacatttatatacagtttaataagcctcttgacaagttacttgttctccncacctgaggtattttttttcctccccaccttgcccctgttcctcccttccatctgtctccctttgcaagaggaaatatttaacatatttgggtccaacttcagtaatgtaatagttaatacattaaaagcatttaacttcctttctaggaaaaatggcacaggctaaggcatagacaaaacaaagagaaatgctgaggaaatttgccactggagacaagcaatctgaataaatatttgccaaaagttctttttatgtcatatagtgtcaggatttgaaggagctatttttttttaatgttgcaactagcaactcatcttcggaagacacagccaggagaatgaagtagaagtgaaaggtttataaatccatttgtaagcatttatcccatatattttaaattcaagaaaaattgtgtttatctttagaattttgtattcaatactttatgtactatgtgactcatgcttctggataaataaagcaccaaatatgtatctgtaaccacaatcacacatattatattaaatatatatctatataacagcctcaaaaaaaannnnnnantaaaaaggnagnanagg

SEQ ID NO: 342 - DNA, 893 bp; single-stranded, linear
  immediate source library: TLYMNOR01
  immediate source clone: 143379
aaaagaagaggcctgtggacagancantcatgtntgattccctggtggtgtgcgaggtagacccagagctaacagaaaanctgaggaaattccncttccgaaaagagacagacaatgcagccatcataatgaaggtggacaaagaccgncagatggtggtnctngaggaagattttcaggttcntggtttacagctacaagtncgtgcnttacgatngtcgattttcctaccctttttttttcancttccccagtcggtccccacgcctagaagacagcggaactaagaaaagaagaggcctgtggacagaacaatcatgtctgactccctggtggtgtgcgaggtagacccagagctaacagaaaagctgaggaaattccgcttccgaaaagagacagacaatgcagccatcataatgaaggtggacaaagaccggcagatggtggtgctggaggaagaatttcagaacatttccccagaggagcttcaaaatggagttgccggagagacagcccaggttcgtggtttacagctacaagtacgtgcatgacggtggccgagtgtcctaccctttgtgtttcatcttctccagccctgtgggctgcaagccggaacaacagatgatgtatgcagggagtaaaaacaggctggtgcagacagcagagctcacaaaggtgttcgaaatccgcaccactgatgacctcactgagccctggctccaagaaaagttgtctttctttcgttgatctctgggctggggactgaattcctgatgtctgagtcctcaaggtgactggggacttggaacccctaggacctgaacaaccaagactttaaataaattttaaaatgcaaaaactcggaaaanaaaaaaaaaagaaaanaaaaaaag

SEQ ID NO: 343 - DNA, 493 bp; single-stranded, linear
  immediate source library: TLYMNOR01
  immediate source clone: 143403
tttggaagaggagggggcntctgtgcctcctctccactaacctntaattcccctttcaaactcaccgggacttctagaaaatgccatttcgctaagggcggaatctggcccgtaaagtctctggagtgagtgctgggaagtttataagcagaggccgcacagggtcagtcagtaatgtcagcccctggggctgaagtgcttcctttgtgggcagaaccccagaagtccctttgtatcgctgacccattaaagactttttctccccattcccnncanccaacttcaggggggcttgatttgtctgttataatcggaaacagattttgggctcctgatccattatagatgtgtttgagatggatgccaaacctgaagccacttaaagagcatgtgaaaatgtgtttagatataaaggaaagaaaggaagagagaggatgaggaaagaaacagcctcttccaaatcccccaactagaaacaatactgaaatgatac

SEQ ID NO: 344 - DNA, 1376 bp; single-stranded, linear
  immediate source library: PANCNOT08
  immediate source clone: 1439061
gagagggctgagggagcagggttgagcaactggtgcagacagcctagctgggactttgggtgaggcggttcagccatgaggctggctgtgcttttctcgggggccctgctggggctactggcagcccaggggacagggaatgactgtcctcacaaaaaatcagctactttgctgccatccttcacggtgacacccacggttacagagagcactggaacaaccagccacaggactaccaagagccacaaaaccaccactcacaggacaaccaccacaggcaccaccagccacggacccacgactgccactcacaaccccaccaccaccagccatggaaacgtcacagttcatccaacaagcaatagcactgccatcagccagggaccctcaactgccactcacagtcctgccaccactagtcatggaaatgccacggttcatccaacaagcaacagcactgccaccagcccaggattcaccagttctgcccacccagaaccacctccaccctctccgagtcctagcccaacctccaaggagaccattggagactacacgtggaccaatggttcccagccctgtgtccacctccaagcccagattcagattcgagtcatgtacacaacccagggtggaggagaggcctggggcatctctgtactgaaccccaacaaaaccaaggtccagggaagctgtgagggtgcccatccccacctgcttctctcattcccctatggacacctcagctttggattcatgcaggacctccagcagaaggttgtctacctgagctacatggcggtggagtacaatgtgtccttcccccacgcagcacagtggacattctcggctcagaatgcatcccttcgagatctccaagcacccctggggcagagcttcagttgcagcaactcgagcatcattctttcaccagctgtccacctcgacctgctctccctgaggctccaggctgctcagctgccccacacaggggtctttgggcaaagtttctcctgccccagtgaccggtccatcttgctgcctctcatcatcggcctgatccttcttggcctcctcgccctggtgcttattgctttctgcatcatccggagacgcccatccgcctaccaggccctctgagcatttgcttcaaaccccagggcactgagggggttggggtgtggtgggggggtacccttatttcctcgacacgcaactggctcaaagacaatgttattttccttccctttcttgaagaacaaaaagaaagccggggnatgacgggntnnattcctgaaaaatcccagcaattttggggngggcttaggcaaggttggatncacttgngggtcaaaggaggttttnagaccnccctt

SEQ ID NO: 345 - DNA, 200 bp; single-stranded, linear
  immediate source library: THYRNOT03
  immediate source clone: 1440128
gaggccaagcagggcacctggagaggatcggcagcttgccgccgcgaggggcgcgggatgttcgagaaagacccggacggattatttttaccccagatattagactgaatcacaaagtatgggtctccgtccaccaaaactcaggcttcgccactgcgtgcaaaccgcctgaccagtgcatgcaacccctgatagaaggg

SEQ ID NO: 346 - DNA, 252 bp; single-stranded, linear
  immediate source library: TLYMNOR01
  immediate source clone: 144388
acggcctttaatcacttcgacctgctcggtattgaaggtgtcgcgcgagacgctgccgatatcgcgaatgcatcaatataaatactgttagaggtatcggcaccacgcatataaatggcgtcgcagtggtggagttaccgttctcacccgcaaaaaacgcacccacgccggggacgtttttgagcgcgtcggtaaggttggttgcgccctgatctttaatcacttgttcagaaattaccgtcatcgtgcgtt

SEQ ID NO: 347 - DNA, 1208 bp; single-stranded, linear
  immediate source library: THYRNOT03
  immediate source clone: 1444245
cttttgagttcattgaggaagctcaccagtgtgggaaggggcttctcatccactgccaggctggggtgtcccgctccgccaccatcgtcatcgcttacttgatgaagcacactcggatgaccatgactgatgcttataaatttgtcaaaggcaaacgaccaattatctccccaaaccttaacttcatggggcagttgctagagttcgaggaagacctaaacaacggtgtgacaacgagaattcttacaacaaagctgatgggcgtggagacggaaggcctggggatcaacctgggctgtccacacagaaaacaaaaacccaaccaaaccaagccctgttgtgctcactggtgcaaagagaagatcagggcagcttaagtggtctaagaatccttcaggnattctttaaggagaaaaaggntacctttgattttgtgtgtttcatgctctggattttttttttttttccttctctgggtttaagagnttttttttgaaatagtgaggaactgaccattatatgccttcactggnttcttgtgcaataatttacaccaaagctggatgggcgtggagacggttgtgtgacaatggtctggatggaaaggattgctactctccattaggagacaatgaggaaggaggatgggattctggtttttnttntntntnngagtntttgtagttgggagtaagtttgtgaatggaaacaaacttgtttaaacactttatttttaacaagtgtaagaagactataacttttgatgccattgagattcacctcccacaaactgacaaattaaggaggttaaagaagtaatttttttaagccaacaataaaaatataatacaacttgtttctcccccttttccttttaagctatttgtagagtttatgactaaatagtctgtgcaggttcatagaccgaagatactacacactttaaaccaattaaaaagaaccaaaagtaaatagaaaagacattgaatcaccaaggcctgggatcaacctgggctgtccacacagaaaacaaaaacccaaccaaaccaagccctgttgtgctcactggtgcaaagagaagatcagggcagcttaagtggtctaagaatccttcaggcaattcttttaagggggaaaaagggtacctttgatttttgtgtgttcaatgctctggnttttttnttttttttccttctctgggttaaggg

SEQ ID NO: 348 - DNA, 337 bp; single-stranded, linear
  immediate source library: TLYMNOR01
  immediate source clone: 144484
ctcctagcccactcacagctgcagttgactcattggatttcttcttaagtgacaaatgaagccagaggttacccgatgcagggctggtgctccacctaaagttgaccagccaggcctaggaatgccactccctgctcctaaagccctccaagaccgttgcctaggggaggcggcctcatgtcccaagggatggggcccccagggtctgggccgtgtggcctcaaggcacagctcaggggagctgccctcactctgtcctctcccgagactgccacaacaccttgcccctctgttatcccatatgatcatggatttgatagaaaatgtcccattcggg

SEQ ID NO: 349 - DNA, 296 bp; single-stranded, linear
  immediate source library: TLYMNOR01
  immediate source clone: 144491
gttaaatattgctcaatttttatttacatgtaaagaaaacagatttaaatgtttatgtggccaaaaggtgtcatttaaaaggtaaaataagtttatgtagaatgtatgttcatggtgcttatttttaaaatgtaattcaagtttacagtattacttaatgcttctttacagaatttaatagagaaacaaggctagaacacatctacatcctgaagagccgtttataacttcatattatatgatgacaaagttcattattttccttaaagttgagcaattgacttttatggtccaat

SEQ ID NO: 350 - DNA, 613 bp; single-stranded, linear
  immediate source library: PLACNOT02
  immediate source clone: 1445507
ggaggtgtaccaccacctgggcgtcgtgccccctcgtggagttctccttcatggaccaccaggctgtgggaagacattacttgcacatgcaattgctggggaacttgacctgccaattttgaaagtggctgctccagagattgtgtctggagtatccggagagtctgagcagaagctgagagaactatttgagcaagctgtgtcaaatgcaccatgtatcattttcattgatgaaattgatgctattacccccaaaagagaagtggcttcaaaagatatggaacgaagaattgtagcccaactcctaacctgcatggatgatctgaataatgtggctgctacagcccgggtcctagttattggagctactaatcgaccagactcgttagaccctgctttgagacgtgcgggaaggttcgaccgagaaatatgcctaggtatcccagatgaagcatccagggaaagaatacttcaaacattgtgcagaaaactgaggcttcctcaagcttttgatttctgtcacttagcacacctaactccaggctttgttggtgctgatctcatggcactgtgccgagaggcagcaatgtgtgcagtcaatagagtcttaatg

SEQ ID NO: 351 - DNA, 362 bp; single-stranded, linear
  immediate source library: TLYMNOR01
  immediate source clone: 144735
ttgccggcatccaaactgtacagttccctttgctttggcaataacgtattatgctgaatcaatgtttctcagcccttaaatggcctttctgtgcttagcagccatgtcctcagtagctcagttggttctctctcacaacaactttcaagtaaaacaaaaggctagaagaaatgttcttgacctgggttttgtgtgtactgaagggcagggcaatgtggtaaaggttatttgcatagaaagttggggagattgtgtagacttgggggcttacacagatgactttctatttaataagagcccagatgcaatatgccaggcttcagataaaaagacaggaggccaggcatggtgctcacgcctgt

SEQ ID NO: 352 - DNA, 283 bp; single-stranded, linear
  immediate source library: PLACNOT02
  immediate source clone: 1447451
ccgtatcccacagattgcagcattgtcagtttcttagcgaggttgggctgttcatcatgtctggactatttcacgacccaggggctgaccaccatctatcagattgagcattactccatggatgatctggcaagtctgaaaatccctgagcaatttcgacatgcgatctggaagggcatcctggaccaccggcagctccacgaattctcctccccttctcatctcctgcggaccccaagcagtgcctctacagtcagtgtgggctccagtgagacccggggtg

SEQ ID NO: 353 - DNA, 626 bp; single-stranded, linear
  immediate source library: TLYMNOR01
  immediate source clone: 144991
agaagaggaaggncagcaggtaggtggtggatagaagcctggattgcnatttgaactcatcagtaactccctggctgccccctgggcacaagcctcccttctctgaaccttagttccccttctatccagtgagaagattggtcaagataatctctaagctttgttccagatctgatagactaagaagccacttcctttgcttccacttcctttggcagcacagtgttgcaacatctgtacttggatccccttcctttgacaagaatcttgcaacatgccaccctgtattagtttccttggaaagcacaattttgcaaaaggcctccctgaatcccatttttcaaatgctgatagaatgacacatacctcctctccacttagtggcttagcttgcgttttaacttttcctttcacacccatcatacatactgttctgtgactccccgaaagagggattctctctacattctgaaatttgttgtccctatcctggtattgagaagtcaccttcctgatacaaaaagaaggaacaagttgggagaccacagtgactcaacgacagtaagttcctgggatcacctgaatcagaaccagctgttaaaaggctagattnnnnngtgnngtnt

SEQ ID NO: 354 - DNA, 1741 bp; single-stranded, linear
  immediate source library: PENITUT01
  immediate source clone: 1450668
ctgcgtgcgagcgctgacagccatcatcacctaccatgacagggaaaacagaccaagaaatggtggcatctgtgtggccaatcatacctcaccgatcgatgtgatcatcttggccagcgatggctattatgccatggtgggtcaagtgcacgggggactcatgggtgtgattcagagagccatggtgaaggcctgcccacacgtctggtttgagcgctcggaagtgaaggatcgccacctggtggctaagagactgactgaacatgtgcaagataaaagcaagctgcctatcctcatcttcccagaaggaacctgcatcaataatacatcggtgatgatgttcaaaaagggaagttttgaaattnntcnggcngggagccacagtttaccctgttgctatcaagtatgaccctcaatttggcgatgccttctggaacagcagcaaatacgggatggtgacgtacctgctgcgaatgatgaccagctgggccattgtctgcagcgtgtggtacctgcctcccatgactagagaggcagatgaagatgctgtccagtttgcgaatagggtgaaatctgccattgccaggcagggaggacttgtggacctgctgtgggatgggggcctgaagagggagaaggtgaaggacacgttcaaggaggagcagcagaagctgtacagcaagatgatcgtggggaaccacaaggacaggagccgctcctgagcctgcctccagctggctggggccaccgtgcggggtgccaacgggcttcagagctggagttgccgccgccggcccccactgctgtgtcctttccagactccaggggttccccggggctgctctggatcccaggactccggctttcgccgagccgcagcggggatccctgtgcacccggcgcagctacccttggtggtctaaacggatgctgctgggtgttgcgacccaggacgagatgccttgtttcttttacaataagtcgttggaggaatgccattaaagtgaactccccacctttgcacgctgtgcgggcttgagtggttggggagatgtggccatggtcttgtgctagagatggcggtacaagagtctgttatgcaagcccgtgtgccagggatgtgctgggggcggccacccgactctccaggaaaggcacagctgaggcactgtggctggcttcggcctcaacatcgcccccagccttggagctctgcagacatgataggaaggaaactgtcatctgcaggggtctttcagcaaaatgaagggttagatttttatgctgctgctgatggggttactaaagggaggggaagaggccaggtgggccgctgactgggccatggggagaacgtgtgttcgtactccaggctaaccctgaactccccatgtgatgcgcgctttgttgaatgtgtgtctcggtttccccatctgtaatatgagtcgggggggaatggtggtgattcctacctcacagggctgttgtggggattaaagtgctgcgggtgagtgaaggacacatcacgttcagtgtttccagtacaggcccacaaaacggggcacggcaggcctgagctcagagctgctgcactgggctttggatttgttcttgtgagtaaataaaactggctggtgaatgaactgggggattctccctttatttctccccctggctgtgggcctgagtagcaggcttctcgtgaggattcccgttctcttntgggaaaaatggccctggg

SEQ ID NO: 355 - DNA, 355 bp; single-stranded, linear
  immediate source library: TLYMNOR01
  immediate source clone: 145287
acacactgggctaggccacacaatgagatctccgtggcaacacaaaatgaaccgtggacacacactgcacggcggatgaatatgcagacatcaggccacgtgaagggagccaggccccgaggcgccacgctttgtgattcaggaaagaaagcacgcagccaaagagcgcaaagaggctcagaggaggcccgggtgccctggagagacgctgcgtcctgacgacacagcatccctgtcccgcagcggagatttcccagatgaaggattccccggcgggagacagggccctgcacacaggtcctctgccacgctgctcaccatgcctgtgtgttatctccccatgaaaagtcaccta

SEQ ID NO: 356 - DNA, 331 bp; single-stranded, linear
  immediate source library: TLYMNOR01
  immediate source clone: 145330
tttcatccccatgatatgggcagaggagggagaaataataaaaggctgggattcccttgtttgtgaaaaggttggaaaataccacccaagtggacattggaatgtagaatgtgagcacgatgctgggcaggtgcactgtagcgcatgatgtgccctgaaccagtggaaagggaccgtgtgatgctgtgcattctctgaacctgtatcctcttgaaaccaacaaacagaaggcatttttgttgtggagccctctgtacaatgtacagcaaaataactcagaaccagagatgttgctccatgttaggtaatactagaagaataaagttttact

SEQ ID NO: 357 - DNA, 1172 bp; single-stranded, linear
  immediate source library: PENITUT01
  immediate source clone: 1453807
ccagcattgcgcagtgatgaagtgattgatttaatgataaaagaatatccagccaaacatgctgagtattctgttattctacaagaaaaagaacgtcaacgaattacagaccattataaagagtattcccaaatgcaacaacagaatactcagaaagttgaagccagtaaagtgcctgagtatattaagaaagctgccaaaaaagcagcagaatttaatagcaacttaaaccgggaacgcatggaagaaagaagagcttattttgacttgcagacacatgttatccaggtacctcaagggaagtacaaagttttgccaacagagcgaacaaaggtcagttcttacccagtggctctcatccccggacagttccaggaatattataagaggtactcaccagatgagctgcggtatctgccattaaacacagccctgtatgagccccctctggatcctgagctccctgctctagaccagtgatggtgattcagatgatggcgaagatggtcgaggtgatgagaaacggaaaaataaaggcacttcggacagctcctctggcaatgtatctgaaggggaaagccctcctgacagccaggaggactctttccagggaagacagaaatcaaaagacaaagctgccactccaagaaaagatggtcccaaacgttctgtactgtccaagtcagttcctgggtacaagccaaaggtcattccaaatgctatatgtggaatttgtctgaagggtaaggagtccaacaagaaaggaaaggctgaatcacttatacactgctcccaatgtgagaatagtggccatccttcttgcctggatatgacaatggagcttgtttctatgattaagacctacccatggcagtgtatggaatgtaaaacatgcattatatgtggacaaccccaccatgaagaagaaatgatgttctgtgatatgtgtgacagaggttatcatactttttgtgtgggccttggtgctattccatcaggtcgctggatttgtgactgttgtcagcgggcccccccaacanccaggaaagtgggcagaagggggaaaaacagcaaagagggataaaatagtttttgactctaatactgtatatgcatttaagtggaatatttggtgccatttacaacattattttcatgccaataaaagattt

SEQ ID NO: 358 - DNA, 1143 bp; single-stranded, linear
  immediate source library: COLNFET02
  immediate source clone: 1456841
gccaggtgccctgaggtggcctagcagcccaagtgatctcacccctcctcacccctaaagctatcaacctgctacagtcctgtctaagcccacctgagagtaacctttggatggggttgggcccagcctggaccactagccgggccgactggacaggcgatgagcccctgccctaccaacccacattctcggatgactggcaattccagagccctccagccaagcacccttaggataccaggaccctgtttcccttcggcggggaagtcataggttagggagcacctcacactttcctcaggagaagacacacaaccatgaccctcagcctggggaccccaactccaggccctccagccccaaacctgcccagccagccctgaaaatgcaagtcttgtacgagtttgaagctaggaacccacgggaactgactgtggtccagggagagaagctggaggttctggaccacagcaagcggtggtggctggtgaagaatgaggcgggacggagcggctacattccaagcaacatcctggagcccctacagccggggacccctgggacccagggccagtcaccctctcgggttccaatgcttcgacttagctcgaggcctgaagaggtcacagactggctgcaggcagagaacttctccactgccacggtgaggacacttgggtccctgacggggagccagctacttcgcataagacctggggagctacagatgctatgtccacaggaggccccacgaatcctgtcccggctggaggctgtcagaaggatgctggggataagcccttaggcaccagcttagacacctccaagaaccaggccccgctgatgcaagatggcagatctgatacccattagagccccgagaattcctcttctggatcccagtttgcagcaaaccccacaccccagctcacacagcaaaaacaatggacaggcccagaggctgaagcaaacagtgtcccttctggctgtgttggagcctccccagtaaccacctatttattttacctctttcccaaacctggagcatttatgcctaggcttgtcaagaatctgttcagtccctctccttctcaataaaagcntcttcaagcttgtaaannnanannnnannaacggctcgag

SEQ ID NO: 359 - DNA, 2340 bp; single-stranded, linear
  immediate source library: TLYMNOR01
  immediate source clone: 145856
cggcacgagctgttttgaagcctgcaatgtggaaaagtgagaagtcagagggaacaggacaggtgcagccgggctctgaggccacacctcacacctcgctgttccccaacatcccctgagcagtgtgagctcatctcaccagatgagaagaggccctgtgcatttcttttgtttgtttgttgctgttttcccccacccatccagttctcctcagcaaagcaaattccttaacacctttggtggagaatttcttacccagacttggggctgtgatgcccttcagtgcgtggtgagtgcagcgtgtgtgcgtgtgcctgtgtgtgaacctgggggccatcctggtggcctgggagcgtgaggagaggccccctgtgtgctgggtgagtggtgggtgtggggtcaatgcagtgaggctctctgggtgaggctcccaacctggcagtccccagcctcccagcatctgtaagcgtctgttggactttacagaagagcctcatcccgtctgcccctcactctgccctgggaatcaacatcttccgagtccttcttgggggaaatagcagagccccacttagcttcataaactgcttcccattccgcagcccagttctgattgttgaggtgtcgcgtcgttccaggtcccccagtcccctctttctcctgtcctctctctgtccttcacctccccactccagccccggctcagttcagggaaatgctgttccacatcagccctctgctctctgaggcagccgcgcctctgaactcggagctacttgaaacttctgctcttgctaggattggagtctacctatctcttccatttgtcccagctgggagtttctgggaactttcctcctcggggtgggggtgggggttgttaaggattgctngggggcctgggggaaggaaggagttcaagaggaagggtgtccccttgtcctcttgatgtcaccctccgctcctgggacacgtgctctctctgtctctgggtcttctggctgtgcacgtttgtgtgtccttgtaaatatgttttaggaagaaagcaaaagggactgaactagcctctggtaggattgcaggggtccagccttgcctgtttccgaagcccccacactgcctttcgccccactgagactggtcccctcaaaaggtagacaaaacagcagctccctgtggagctgatagggcggcctcaaagtggctttttgttagacaaggttaaggtttcctcatgagcaaggttgcagatcggtccttcctcagctccttgatttgtgaccttgaccaaggggcctgccacccagcccctccagtgccctctcctcgatgcctcgctccttcctgcccccactcccctggcttaggcaggtaggggaattagggccatgctggaagaagcttaaccatgtgttcaaagaacggtttcttgcttgcttggtcctggaactccccttggctgccccaggcctccttggcccatgggtgctgggggaggtggatgtcagatctggtaggttgcagcagagaaaataaatgtgccttgagagaccactcagagagggtccaagggtgatggagaaggaagcatggcctgggagcttggaagggaggggtggtgggtggcggcatcttgactgccccctgttgtcccacacgtggggggtggtcaccccccttcactccagcccgcctgccttcagccttccatgagcttcacctgcttccaacttcactttggagggggtggggtccgttggcatcaacacggggaccctctgcttcaccaaagcccgagccctcagcccctggggagaacaaatggctgagctttgatacctggggtcgtcgagaggctgcgggctggcggcagtcccagggggagagacaccacagaaggagacccagacatcccgaggaagttcccagcagagcaaactgctttccagcctgaagcctgcttaaactgtgtgatgtgcaataactgagcttagagttaggaattgtgttcaagtgcttggatttccgtctgtagatttaactgctgaaattgtatctctcagtaattttagatgtcttttaaaaaattgaaaaacaaagtgttagactgtgtgcgtgtgcgttgatgggcactcaagagtcccgtgagtcatccagccctgcctttcccctgcgcccccatcctctcacgtcccgccctgcctccacttggggaccctgcctcgtgtcgtctttatctgcctattactcagcctaaggaaacaagtacactccacacatgcataaaggaaatcaaatgttatttttaagaaaatggaaaataaaaactttataaacatt

SEQ ID NO: 360 - DNA, 1703 bp; single-stranded, linear
  immediate source library: COLNFET02
  immediate source clone: 1459391
gcgagcctattcagacgtttcactttcaggcccctacgatggccacgtaccaggtggtggagctgcggatcctgactaactggggccaccccgagtacacctgcatctaccgcttcagagtgcatggggagcccgcccactagccctgcttactggtgcctgctgccagccatctgggagtgggtgaacagcaccccgccgcttcccccacacgcttgctcggcgctctgacttctaggagcacaagagaggagcctgtggccccatgcagatgaaaaggacgggcagggtctcctgagcagcaggtggctcgaggcggttagcagggttccagcagctcccttcttccttccctctgtgcccgtggcgtctgcttcccatcctgggagtgtgtatatatgtagcatatcatgggggactgggaagttgggagaggtaggacctgactggtcttggctggggtcagggggctngttgcctgggagctgatgaagcaggtgccagggctgtgggaggggcaagctacggcctgggctaggtgagctgcctctgcccctgggcaaggaagcgaggccctctgggcaggtagggtgcttagctccagagcaggatgggacttccccaggcaggaagcacttgatggagagctgcccagctctcctacaaggttagtgccctccacctagggaagcatgaaccacagggtccctgagggccttcgacaaaagtgtgtatttgtcccggggagggtagcagtgggccatggggcttcttgtgccctaaaggggactggctgctgtgatcttctaaggggcccagggccaaccctgtaggcttcccctctgctggggacggtagttgcttttctctctcctgatgctaggttggggcccaccctgctccctgttcctgctagggcctgccagtgcccctgagcttgctttccacattctcccagggtatgggagacctaggacctgtctttggggccattagcatctggggttatagcaagaagagttgggagcatggaactcctgggctcttgtggggacgttcagggtatcggggtgcgaggtctgtctgcaccggcccccacatctaaccaggccctgatgtaggggtcgtccgctcaggctgcccccttggggctcttgcagctcttgttcaggtagtcgcccttctggtttgttctctgtggggcagttggtgggggctgggggaagaggctggcagaagttaccctgggatagggaagggggaggaggggacttttagagccagcaagccctacttgtattatgtatatatttttcaaggtctgtttttctaactaaaaagctaagggcttgattcctagccccgttctgtggggcactgggtgatactcagtttcttgttcctggccgattgagaggggcctggggcactggttccggctgtgtctggtggtccggctgcagggaaggggcaagaaggcgggcaggccttcactgcagcactgagcctcaaatccgctctggagcatgaggctggatgcagtggtggtgaggccgccccgctccatcccgaggcagccaggctttgttttgcgctctcctgtcacaaatgctgcactattggttcttaagttttttatctccagatcctaatttatgcctatgcaaaaaataaatgacgcccaagagctgtgggatgtggca

SEQ ID NO: 361 - DNA, 352 bp; single-stranded, linear
  immediate source library: TLYMNOR01
  immediate source clone: 146190
antggaaccaaggttttggccccacctggaattaggtcaaatggcttatttctagttccacgactaggagtgttctttggaaccccacatttgggtagtgaaaattgcacttttctgggcaagactcctataaggctagaaatgacaatgcatcaaaagatgactttattatatttttatcagtggacaaacttcctaaaaaaattcacacactcatatctgcatataaaccaacatcataaaagtactaaaatgacactgttctgaatcatgcagtctttgcaaataacaagctggctgaaaaatatctaaatataattttaatttttgaactttttcttctaattggaaa

SEQ ID NO: 362 - DNA, 606 bp; single-stranded, linear
  immediate source library: TLYMNOR01
  immediate source clone: 146204
cagccactgcgctcggcaaaatacttgactttcttggaccccaagattttacttagaggaaattttgtcctccctgctagtgtccctcatgtgctgtaatttctagtttcatactcccctggttgcaaggtaatattcagtgccgaccacagtatttcagatgttatccgacagtgcagatgagcaggggccatgtgttgtcttgatttttctcactgccatttctattgatgcagtgtagactttgaatcatactttgacctttcttgagccttattgcgagctacttcctgctttatgaattctgctgtagcgatacctcaatcattatgcttttggaacatgttagatttaaggtaggatttaattttttaaaaataaacggcgtcttgtttactcaggctatcatgtttgactgtgtgattaacccccaatcttcttgaaataatttccttaacttgctgaatatagattttttttttcatttgcaaagaaattccctaagatgatccttatcattgttgtatacattcaaggatgaacatatgcatgacaggatttccggaaaagtatttcaagaaactcttttcttatgactcgtnnnna

SEQ ID NO: 363 - DNA, 278 bp; single-stranded, linear
  immediate source library: TLYMNOR01
  immediate source clone: 146256
ttttgtgacttgtgagatagtttaagatatttttatgtgaccaatttgtagantgantacatattttcaaagttatcttttcaaaatcaacttttagagtattttagcaaaatatatgtatagtttataatatagangtatagctttataaagatattaaggatttattttttaaaataattctctgaatagtttgctgtagtagttgccttcagcttaataaaaccatagtacttctacatacatctttataagttaggctatgcctacaaaggtct

SEQ ID NO: 364 - DNA, 2102 bp; single-stranded, linear
  immediate source library: PANCTUT02
  immediate source clone: 1467987
ctccagcgccgcgggatgtagcgcgggggaccgcggcccccagcagagcccgcctgcccggnttttagaagaccaaactggacaatggactttgctcactatgatgacatgatctccattgacctccatttgtctaccatcagagggagatctctgccccctggggctgagagaccccaacctttccccaagctgaagctgcagggtattgaggtaccagccagatgtcttcccaacaaaggatctgtggtggcacaggggaatggggctcctgccagtaacagggaaagctgaacacggtggaactggctgaactgggacccctgctagaagagaagggcaaacgggtaatcgccaacccacccaaagctgaagaagagcaaacatgcccagtgccccaggaagaagaggaggaggtgcgggtactgacacttcccctgcaagcccaccacgccatggagaagatggaagagtttgtgtacaaggtctgggagggacgttggagggtcatcccatatgatgtgctccctgactggctaaaggacaacgactatctgctacatggtcatagacctcccatgccctcctttcgggcttgntttcaagagcatcttccgcattcatacagaaactggcaacatctggacccatctgcttggtttcgtgctgtttctctttttgggaatcttgaccatgctcagaccaaatatgtacttcatggcccctctacaggagaaggtggtttttgggatgttttgcttttttgggtgcagtgctctgcctcagcttctcctggctctttcacaccgtctattgtcattcagagaaagtctctcggactttttccaaactggactattcagggattgctcttctaattatggggagctttgtcccctggctctattattccttctactgctccccacagccacggctcatctacctctccatcgtctgtgtcctgggcatttctgccatcattgtggcgcagtgggaccggtttgccactcctaagcaccggcagacaagagcaggcgtgttcctgggacttggcttgagtggcgtcgtgcccaccatgcactttactatcgctgagggctttgtcaaggccaccacagtgggccagatgggctggttcttcctcatggctgtgatgtacatcactggagctggcctttatgctgctcgaattcctgagcgcttctttcctggaaaatttgacatatggttccagtctcatcagattttccatgtcctggtggtggcagcagccctttgtccacttctatggagtctccaaccttcagggaattccgttacggcctagaaggcggctgtactgatgacacccttctctgagccttcccacctgcggggtggaggaggaacttcccaagtgcttttaaaaataacttctttgctgaagtgagaggaagagtctgagttgtctgtttctagtaagcaaacctcttgagagaattcagtaccaaccaagcttcagcccactttcacacccactgggcaataaactttccatttccattctcctagctggggatggggcatggtcaaacttagccatcccctcctcagcaagggcatctaccggcccctcacagagacagtactttgaaactcatgttgagattttaccctctcctccaacccattttgggaaaattatggactgggactcttcagaaattctgtcttttcttctggaagaaaatgtccctccccttaacccccatcccttaactttgtatcctggcttataacaggccatccatttttgtagcacacttttcaaaaaacaattatataccctggtcccatctttctagggcctggatctgcttatagagcaggaagaataaagccaccaacttttacctagcccggctaatcatggaagtgtgtccaggcttcaagtaacttgagnnnnnnnnnnnnnnnnnnnnnggcagagtaatgtaaaatttaaatggggaaagatatttaatatttaatactaagctttaaaaagaaacctgctatcattgctatgtatcttgatgcaaagactatgatgttaataaaagaaagtacagaagaaaaaa

SEQ ID NO: 365 - DNA, 703 bp; single-stranded, linear
  immediate source library: TLYMNOR01
  immediate source clone: 146892
tgtagctgtcccgggagccctcagcagcagttggagctggtgcacaggaaggatgaggaagaccaggctctgggggctgctgtggatgctctttgtctcagaactccgagctgcaactaaattaactgaggaaaagtatgaactgaaagaggggcagaccctggatgtgaaatgtgactacacgctagagaagtttgccagcagccagaaagcttggcagataataagggacggagagatgcccaagaccctgggcatgcacagagaggccttcaaagaattcccatccagtccaagtggggaggatcatactagaagactaccatgatcatggtttactgcgcgtccgaatggtcaaccttcaagtggaagattctggactgtatcagtgtgtgatctaccagcctcccaaggagcctcacatgctgttcgatcgcatccgcttggtggtgaccaaggggttccggtgttcaacattgtcattctcctggctggtggattcctgagtaagagcctggtcttctctgtcctgtttgctgtcacgctgaggtcatttgtaccctaggcccacgaacccacgagaatgtcctctgacttccagccacatccatctggcagttgtgccaagggaggagggaggaggtaaaaggcagggagttaataacatgaattaaatctgtaatcaccagctatttctaaagtc

SEQ ID NO: 366 - DNA, 377 bp; single-stranded, linear
  immediate source library: TLYMNOR01
  immediate source clone: 146907
agcgaccnacttgccganggcagcaangcaggacantgcaatgaagaaagacccagggaggcccganggggaaccctctgagagaggnatcatctgaagatgtggagaacattccagccccaagaggagngggggtctngaatggatgcctctctcanctggaggagcgaagagaaggcccaggcggctaggctngagggaggaaggtggaggacacaaggcgatgatnccaggaggggccagaccccatcctccaaactcagggaaacctcagctctctcctatgtggacaggatttgtgatggaggatagtttagtgggttaaatcaagaccccccaaaattcacattcatcctaaacctcagaatatgacgtta

SEQ ID NO: 367 - DNA, 319 bp; single-stranded, linear
  immediate source library: TLYMNOR01
  immediate source clone: 146947
aaagtttcttcttaggaaaataggatagtgacttttgnattctgtatgttaaattttctcagtaccattaatcctaagatgaagaggaaggctattgctgcagaggcatagttgaggacgtatagcactataccagagacaagaatgcttagctctagcaagtcttctgtcattgactaccttcataatcttcagcaggtttaggcctttcttagttcctttgtaaataatccatagagtcttagagttataattaaaggtccatggttctaaatacagaagcatatttttgccgcttaactttttctttcttaaagat

SEQ ID NO: 368 - DNA, 1535 bp; single-stranded, linear
  immediate source library: LUNGTUT03
  immediate source clone: 1473337
gaggcctacgagcaggtccaaaagggacccctgaagctgaaaggcgtcgcagagctgggagtgaccaagcggtgaggcccgagggcccgcgggattccgtcttcatcccccttagaccttttctcgggacccctggccctgatcctccgacccgccgcctcctcatgtctttttccaggaagaagaaaaagaaggacaaagacaaagcgaaactcctggaagcaatgggaacgagcaaaaagaacgaggaggagaagcggcgcggcctggacaagcggaccccgggccnaggcggccttcgagaaaatgcaggagaagcggcaaatggaaaggatcctaaagaaggcatccaaaacccacaagcagagagttggaggacttcaaccagacacctggacacactcacggagcattacgacattcccaaagtcagctggacgaagtagccgcctgcccccagtatggagcagcatcgagggttcgcaaaaggccacactggggttgtgtgtgtttcctttggtatattctggaaacatggctacacacacccttgcatcttctgctacagactgcttttcgaagctgtgtaccctcattctggaacttgattaaagtaagatcgtccttgtactcagtttaggcttcttggcaacatacagaagatacacccttttcgtttggatggaaagtttctaagtttatccagaggtaaagcccattgtgtgtctgtgtcatgtaaaaatgttttcacccgagttgcatgtaacgctctgaggccagccagctgtcttctcctggatgagacagactccagagggtaaggagctagcgccatggtggcctgcagtatgcagagccccgcaggacccagcgtgggcgcccttccaagcttcctctagctttgggcctatgctgtcccctgcaggccctagggaagccacttgcaactatgcggccttcagacttcctcctcagccacctggccactgagacagcatagcctgggtaacggaacagccacctaaggcaagaatggaacggacacaccttgctcctttctgagcccgtttcccaaaaccccccttccaggtgcttctaatgggtgttgccatagcagacgctgctaatgcatcacagcattctttgaaatggaaccagacacagcctgcctctcaatcctcagctgggggctcctagcagcctcttgtatttactcagagttgacacatcacacagatcctgtttggcattcctaccttacggacgtctcaggggtgacaggaccagggcagagccccggtacaaacagacaaggctgcagtcaaatgggagggtccaggtgtccgtgttggagggctgggatcttgtagggcctgtgcgtcctggctgaggatcaaaccacatatgttattgggagaaacgatttctgttgacgtagatattgaaagaataatgaaggcagaagagaaaaacgaagtgtggaatttggggttgtcctgtgtaaattacacaataaagcaaaagtcanttattgt

SEQ ID NO: 369 - DNA, 1982 bp; single-stranded, linear
  immediate source library: CORPNOT02
  immediate source clone: 1477849
ggcctgtgccgccgccgacgccgcttgtgggcccgactccgctctgtctgcttcgccaccttctccccgagcactgcccggccggccgccatggctaacgtggctgacacgaagctgtacgacatcctgggcgtcccgcccggcgccacgagaacgagctgaagaaggcatacagaaagttagccaaggaatatcatcctgataaggaattcaaaatgcaggagacaaatttaaagaaataagttttgcatatgaagtactatcaaatcctgagaagcgtgagttatatgacagatacggagagcaaggtcttcgggaaggcagcggcggaggtggtggcatggatgatattttctctcacatttttggtgggggattgttcggcttcatgggcaatcagagtagaagtcgaaatggcagaagaagaggagaggacatgatgcatccactcaaagtatctttagaagatctgtataatggcaagacaaccaaactacaacttagcaagaatgtgctctgtagtgcatgcagtggccaaggcggaaagtctggagctgtccaaaagtgtagtgcttgtcgaggtcgaggtgtgcgcatcatgatcagacagctggctccagggatggtacaacagatgcagtctgtgtgctctgattgtaatggagaaggagaggtaattaatgaaaaagaccgctgtaaaaaatgtgaagggaagaaggtgattaaagaagtcaagattcttgaagtccacgtagacaaaggcatgaaacatggacagagaattacattcactggggaagcagaccaggccccaggagtggaacccggagacattgttcttttgctacaggagaaagaacatgaggtatttcagagagatgggaatgatttgcacatgacatataaaataggacttgttgaagctctatgtggatttcagttcacatttaagcaccttgatggacgtcagattgtggtgaaatacccccctggcaaagtaattgaaccagggtgtgttcgtgtagttcgaggtgaagggatgccgcagtatcgtaatccctttgaaaaaggtgatctttacataaagtttgatgtgcagtttcctgaaaacaactggatcaacccagacaagctttctgaactagaagatcttctgccatctagaccggaagttcctaacataattggagaaacagaggaggtagagcttcaggaatttgatagcactcgagggctcaggaggtggtcagaggcgtgaagcctataatgatagctctgatgaagaaagcagcagccatcatggacctggagtgcagtgtgcccatcagtaaactctgcaaacaaattgcacaggtggattttctttccacatttgcctgatttgttctcagcaatccagctggagtgtcttatcaatccagatgaactgagggacatctgttggtctatgtataacttttaaaattggtatagtatctacagagtgtataatttaaactaaccacaaagctttacatcttcattttgactgttccatagcagaataaagcacttgaaaggaaacaagactccctttcacacatggattattataagtttcaatcctggtatctgtgcttggatttttattcagttttgtgtagatttttatgtttcatattttaaatttaaatcccacattgtaaagtttgtacaatttgtcctgaaagctttgtgtttggctgcacctgcataagctgctacaaatagaataaagaatttcatagcctatatctatcatttagatgcatggaaaaaaatgggctttgcacacaatgggtttggagctgactgggaacaatggaaaaaattacattagctgtggttgtaaagtttttttgtttttggttttgttttttnttnctattntcttnntattttntattaccatcttgtgaaaggtttctgaaactcgataataaaaagcggttggtgtaaattat

SEQ ID NO: 370 - DNA, 961 bp; single-stranded, linear
  immediate source library: CORPNOT02
  immediate source clone: 1481932
cttacctcaagtcgtgcatttatgatgctaaaacagatcccttctgccccatattccgtcttggcanaatagtggagaacgcaggacacagtttccaggacatggccgtggagggaggcatcatgggcatccaggtcaactgggactgcaacctggacagagccgcctccctctgcttgcccaggtactccttccgccgcctcgatacacgggacgttgagcacaacgtatctcctggctacaatttcaggtttgccaagtactacagagacctggctggcaacgagcagcgcacgctcatcaaggcctatggcatccgcttcgacatcattgtgtttgggaaggcagggaaatttgacatcatccccactatgatcaacatcggctctggcctggcactgctaggcatggcgaccgtgctgtgtgacatcatagtcctctactgcatgaagaaaagactctactatcgggagaagaaatataaatatgtggaagattacgagcagggtcttgctagtgagctggacccagtgaggcctaccccacaactgggctctccacagccccatcaaagaacagagaggaggaggagggagaaatggccaccacatcaccccagagaaatttctggaatctgattgagtctccactccacaagcactcaggggttccccagcagctcctgtgtgttgtgtgcaggatctgtttgcccactcggcccaggaggtcagcagtctgttcttggctgggtcaactctgcttttcccgcaacctggggttgtcgggggagcgctggcccgacgcagtggcactgctgtggctttcagggctggagctggctttgctcagaagcctcctgtctccagctctctccaggacaggcccagtcctctgaggcacggcggctctgttcanncactttatgcggcaggggangncgcctggcngcagtcactagact

SEQ ID NO: 371 - DNA, 381 bp; single-stranded, linear
  immediate source library: CORPNOT02
  immediate source clone: 1482516
gtcaatcagaacttgctccaccaccagcaccaaacccagggcgctcttggtggcagccgtgccttgtcgaattctgtcagcaacatgggcttgagtgagtccagcagccttgggtcagccaaacaccagcagcagtctcctgtcagccagtctatgcaaaccctctcggactctctctcaggctcctccttgtactcaactagtgcaaacctgcccgtcatgggccatgagaagttccccagcgacttggacctggacatgttcaatgggagcttggaatgtgacatggagtccattatccgtagtgaactcatggatgctgatgggttggattttaactttgattccctcatcttcacaacagaatgttgttgggtttta

SEQ ID NO: 372 - DNA, 1536 bp; single-stranded, linear
  immediate source library: FIBRNGT01
  immediate source clone: 148286
aaattatataaaaagaaaattaaggacaaccaagagaaacatgggacatatacctcctgactgaatactaactggagacctttcatttgctcatggggctgcttaaatagcaggtctaagaaagtgtaaattattataatcaatctgtggacagtaaactttttaaaaatttttcttctgcattttggttttataaaatgatgtattataaaggtcagttattaaattactttgaagtaactgaccctgtgcccttatggactaagtaagggtagctgttttaagggaacagcatcactttcgggttcaaaaacaactgtacacattacatatctgcagtgtcttcactgaaaattagagatagaattagttgaagagacttccttaattgctacattgttttactcactgagcaatatcagaaactaaaacatagattaataattcactcactgtttctattcttcttaaaaagagtgaaatctttttaatggaatggttgaagattcctgccaactcaaaatacagtacagctagtaaaatgttgaaacatcagtttctaaatcacctttgctccattagctaattttttggacactaaatgcttcaaagataaggaacttcatcctaatgatttctaaagagcagttaaaagcattaaaataagtaggtaggctgttaagattaaaattaacattttggggacagaattgtgtctgtaaaaatgtcattggttttattacaagtggattattttattcatattttaaaacaaatgtttaagccacattgatttatcctcattgaggattatggtctgtgaccacagtaatatccacttatataaatgccaaataatcagagagcttataaagtacaattgtttttgtcatcattttctgaatttctttctcttcttttggttttgtcctctcattgaagttccagtggtttgaaattagttttggacacattgtcttaatgtactgaaaattgctctgctgtattttgcagcgttcttcatttaatttataatggtccatattagacacatttggtaagagaagtccaggaacacatttagggccatggtaatagtattttgtaaaatccatttgggaagttgcaatacccacaatctgacatgtcctaaaatgtaagggattatctctaaggggttgatgggagaaatatttagatgtaccctgttaacagccagtcattttgatttacttatggaaatcaagtgaataaaaggcaacataatttgggaaattttattctaatatctaataaaaacagtttgagtggttgaagacatctgcatgaaattgcacctaggtgcatgtacttggatataactctcccctaaaactgttgtaattgcattttttcccttttcttggcacccctttagaaatgtactgaagtctcatttttcacccatttcagccatgggacatttttcataatattaatgtaaagatgtttgtgttactgtttataaattacaattgtaaataaattactagtttg

SEQ ID NO: 373 - DNA, 2114 bp; single-stranded, linear
  immediate source library: BRSTNOT08
  immediate source clone: 1488169
gcctcagaagtccgtgccagtgaaccggaggcggcggcggcgagcggttccttgtgggctannagaatcctgcaaaaatgtctctctatccatctctcgaagacttgaaggtagacaaagtaattcaggctcaaactgcttttcctgcaaaccctgccaatccagcaattttgtcagaagcttctgctcctatccctcacgatggtaaatctctatcccagactgtatccagagctctctcaatacatggggctgagtttaaatgaagaagaaatacgtgcaaatgtggccgtggtttctggtgcaccacttcaggggcagttggtagcaagaccttccagtataaactatatggtggctcctgtaaactggtaatgatgttggaattcgtagagcagaaattaagcaagggattcgtgaagtcattttgtgtaaggatcaagatggaaaaattggactcaggcttaaatcaatagataatggtatatttgttcagctagtccaggctaattctccagcctcattggttggtctgagatttggggaccaagtacttcagatcaatggtgaaaactgtgcaggatggagctctgataaagcgcacaaggtgctcaaacaggcttttggagagaagattaccatgaccattcgtgacaggccctttgaacggacgattaccatgcataaggatagcactggacatgttggttttatctttaaaaatggaaaaataacatccatagtgaaagatagctctgcagccagaaatggtcttctcacggaacataacatctgtgaaatcaatggacagaatgtcattggattgaaggactctcaaattgcagacatactgtcaacatctgggactgtagttactattacaatcatgcctgcttttatctttgaaccatattattaagcgggtggcacccagcattatgaaaagcctaatggaccacaccattcctgggggtttaaaattcacgggaccatggaaatgtagctgaacgtctccagtttccttctttggcaacttctgtattatgcacgtgaagccttcccggagccagcgagcatatgctgcatgaggacctttctatcttacattatggctgggaatcttactctttcatctgataccttgttcagatttcaaaatagttgtagccttatcctgggttttacagatgtgaaactttcaagagatttactgactttcctagaatagtttctctacttggaaacctgatgctttttataagccattgtgattagggatgactgttacaggntttaggctttgtgtgaaaacccagtcacctttctcctaggtaatgagtagtgctgttcatattactttagttctatagcatacttgcatctttaacatgctatcatagtacatttagaatgattgcctttgattttttttttaaattctgtgtgtgtgtgtgtaaaatgccaattaagaacactggtttcattccatgtaagcattaaacagtgtatgtaggtttcaagagattgtgatgattcttaaattttaactaccttcacttaatatgcttgaactgtcgccttaactatgttaagcatctagactaaaagccaaaatataattattgctgcctttctaaaaacccaaaatgtagttctctattaacctgaaatgtacactagcccagaacagtttaatggtacttactgagctatagcatagctgcttagttgtttttgaggattttttagtcaacacataatggaaaccttctttcttctaaaagttgccagtgccactttttaagaaagtgaatcactatatgtgatgtaaaagttattacactaaacaggataaacttttgactccccttttgttcatttgtggattaagtggtataatacttaattttggcatttgactcttaagattatgtaacctagctactttgggatggtcttagaatatttttctgataacttgttccttttcctgactcctccttgcaaacaaaatgatagttgacactttatcctgatttttttcttctttttggtttatgtctattctaattaaatatgtataaaataaaagttacatttttaggtctggtctt

SEQ ID NO: 374 - DNA, 1423 bp; single-stranded, linear
  immediate source library: BRSTNOT08
  immediate source clone: 1488278
gtttaaggaagaattttttcactgggtgaataacgttttgtgcagcaaatgtggtggacagactaggtctagagatagatcattactgcccagtgatgatgagctgaagtggggtgcaaaggaagtggaagatcattactgtgatgcctgccagttcagcaatcgattcccaagatataataaccctgagaaacttttggaaacaagatgtggacggtgtggcgagtgggccaattgttttacactgtgctgccgagctgtagggtttgaagctcgctatgtttgggattacacagaccatgtctggacagaagtctattctccttctcagcagcggtggctgcactgtgatgcatgtgaaggatgtctgtgacaagccacttctttatgaaataggatggggcaagaagctttcctatgtcatagcattttcaaaagattaggtagttgatgtcacttggcgatattcctgcaaacatgaagaggtgattgccagaagaactaaggttaaagaagcattacttcgagacactattaatgggcttaataagcagaggcaactgtttttgtcagaaaacagaaggaaagaacttctccagaggataattgtggagcttgttgaatttatatctcccaaaacccctaaacctggagaacttgggggaagaatatctgggtcagtggcttggagagtagcccgaggtgaaatgggtctacagagaaaagaaaccttgtttattccctgtgaaaatgagaagatttctaaacagctccacctttgttacaatattgtgaaagatcgttatgttcgagtttcaaataacaatcaaaccatttctggatgggagaatggcgtgtggaaaatggaatctatattcagaaaagttgaaacagactggcacatggtatatttggcccgaaaggaaggatcatcttttgcttatatttcctggaagtttgagtgtgggtcagttggcctaaaagtagatagcatttctattagaacaagtagtcaaacttttcagactggaacagtagaatggaaattgcgatctgatacagcacaagtagacctnacaggcgataacagtcttcactcctatgctgatttttctgggtgccactgaagttattttggaagcagaattaagcagaggagatggtgatgtcgcttggcaacacanccagcttgtttagncaaagcttnaaatgaccattgangaaaatttgtttgggngntaanttataaaaatccaggtgccctttgagaccctgaccattntaggaaacnttnaaatnatnaaaggccttcctnnaggnagccttnttgggccagtccatcnttagtttngagttcccccctgcngttcgananttcttttcancgttccancatgaccccnatgaattccttttcgggctt

SEQ ID NO: 375 - DNA, 1426 bp; single-stranded, linear
  immediate source library: BRSTNOT08
  immediate source clone: 1489285
taaatatccagggaaccctgcccagactaatactgttggtggcataagagaatcaagccattctcaagagataacttcataaccagaattgtctgttggctagcagctgtcacagataggcagggcacttgggatatgacctttctgtccaggtgattcacagactagacctttcttatcctcctcctagagttttgacttgggactctagtgttaaggatgatgagcccgtgcatcaggtccttctgcactttggtggaagtctcccagggtaggtttcctatttgaaacagtggaatcatgtttccagtgataaagtttaatgacctcatcctttttttttttttctcatctgccatttgtgtgtcttagatgggttttaattgcatgaatgtggctaatgtggttctcagaaattggtcagtatggcccgacatagcttctgctctgtcttactgactcaatacctttaggatttgtatcagagtttggatactagtgttagtggtggtgtcaccactacttaattgggagataatgaaaccaatcatggaatgctgtttttattgggcatgtcatctaagagaggaggaaatagctgggttttgggtctaattatgaataaggactgattcagaaaacgagtttatggtaggtaggactaaagtttcacatcaggactgtaccattgtgatttagacactatctaaaattcagagcatatcatctggggctacctcagggtcacacacccatgtattgggcttagtcaggattgacagatacattctcagctggcctgtcatataaaacatactgtcattggagcttaagctccgcttgttctggaggtttcacctccatgtgtttcattggtgcaaaagtggatctcttagttggtcacttaattctttctttttcagaaagatagtatgttcactggtatatttggtcactcttagaaccttccttcacattgttttttatgggacccatgaatggttagcctttcttttctattgtagaaggaaataaataggagtaaaaagaccattgtagtaaataagttcaaggggaacttgggaccagaaaccactgttatgtacaaaaaaatggcaaattcaataaactcaaatttaaaataatttttaaattaacagttatgataaattttatattttatacaaatagattgcttagaatggttctcaagaattataagagaaatgaactcacagtacaaaaattttataattactatacttgtgttttgtttgggggctgggaaatgtatttttacattgtagccaatcattttatatttgtcaatttaaatcttatgggtcttttttttttatctctcttgatgtcagattttatagtctttttaaataaatccatttaattaaaacgttcttacctttgt

SEQ ID NO: 376 - DNA, 968 bp; single-stranded, linear
  immediate source library: BRSTNOT08
  immediate source clone: 1491277
gaattcgagagtggaggtctcagactcttggaaggggctatactagacacacaaaagacagccccaagaaggacgggtggagtagtgtcctccgctaaaagaccagtagatatgcaacgcctcttgctcctgccctttctcctgctgggaacagtttctgctcttcatctgggttacctcttcttcccagagaatgatgccccccatctggagagcctagagacacaggcagacctaggccaggatctggatagttcaaaggagcaggagagagacttggctctgaacggaggaggtgattcaggcagagggagaggaggtcaaggcttctgcctgtcaagacaactttgaggatgagggaaagccattggagtcggaacccagctgccttagacaaggacttccagtgccccagggaagaagacattgttgaagtgcagggaagtccaaggtgcaagacctgccgctacctattggtgcggactcctaaaacttttgcagaagctcagaatgtctgcagcagatgctacggaggcaaccttgtctctatccatgacttcaacttcaactatcgcattcagtgctgcactagcacagtcaaccaagcccaggtctggattggaggcaacctcaggggctggttcctgtggaagcggttttgctggactgatgggagccactggaattttgcttactggtccccagggcaacctgggaatgggcaaggctcctgtgtggccctatgcaccaaaggtganggggaagggcaccagggcagggagaagggatagtaaagtggattcttaatactacccctttgagctgcctgaacacacctccccaaactcagaccctcccgctgactgaagaacaaaagtcctgtgtgtaaggagggctgagacatagggaatcctcaaagcaaaaccaggtgataggagttctggagacaggggggtgggctggatggt

SEQ ID NO: 377 - DNA, 1328 bp; single-stranded, linear
  immediate source library: PROSNON01
  immediate source clone: 1495437
aaatatnacagagaggtaacttgactatatatgttgcatcctgtgcctcccttcatattaatatttgataaagattttaatttatgtaaaacttctaaagcagaatcaaagctcctcttggggaaatggcaagtctttaggataggcaagaccctgtatgaatagtaccaaagcattaccgcatggtagagaacacactcgattaaaaatgttaagctatctgaaaaataaaatgtgcaagtcttcaggatggcacaaaacaaaggttaatgcttcttggggcacatttcttagagggcttgctgagtgtgtaaatataatcgacttttgtttgtgttacatgacttctgtgacttcattgaaaatctgcacaattcagtttcagctctggattacttcagttgacctttgtgaaggtttttatctgtgtagaatgggtgtttgacttgttttagcctattaaatttttattttctttcaactctgtattaaaagtaaaacttactaaaagaaaagaggtttgtgttcacattaaatggttttggtttggcttcttttagtcaggctttctgaacattgagatatcctgaacttagagctcttcaatcctaagattttcatgaaaagcctctcacttgaacccaaaccagagtactcttactgcctcttttctaaatgttcaggaaaagcattgccagttcagtcttttcaaaatgagggagaaacatttgcctgccttgtaataacaagactcagtgcttattttttaaactgcattttaaaaattggatagtataataacaataaggagtaagccaccttttataggcaccctgtagttttatagttcttaatctaaacattttatatttccttcttttggaaaaaacctacatgctacaagccaccatatgcacagactatacagtgagttgagttggctctcccacagtctttgaggtgaattacaaaagtccagccattatcatcctcctgagttatttgaaatgattttttttgtacattttggctgcagtattggtggtagaatatactataatatggatcatctctacttctgtatttatatatntattactagacctcaaccacagtcttctttttccccttccacctctctttgcctgtaggatgtactgtatgtagtcatgcactttgtattaatatattagaaatctacagatctgttttgtactttttatactgttggatacttataatcaaaacttttactagggtattgaataaatctagtcttactagaaaaaanaaagannanaccnaaaannnaganacnntannanaac

SEQ ID NO: 378 - DNA, 917 bp; single-stranded, linear
  immediate source library: SINTBST01
  immediate source clone: 1501023
gtgctacctcaaggatgcctatgacaatgtgaccctggatgtggagctggctcgccgtgagggctggtgttttggggccaagctggtgcggggcgcatacctggcccaggagcgagcccgtgcggcagagatcggctatgaggaccccatcaaccccacgtacgaggccaccaacgccatgtaccacaggtgcctggactacgtgttggaggagctgaagcacaacgccaaggccaaggtgatggtggcctcccacaatgaggacacagtgcgcttcgcactgcgcaggatggaggagctgggcctgcatcctgctgaccaccaggtgtactttggacagctgctaggcatgtgtgaccagatcagcttcccgctgggccaggccggctaccccgtgtacaagtacgtgccctatggccccgtgatggaggtgctgccctacttgtcccgccgtgccctggagaacagcagcctcatgaagggcacccatcgggagcggcagttgctgtggctggagctcttgaggcggctccgaactggcaacctcttccatcgccctgcctagcacccgccagcacaccctcagcctccagcaccccccgcccccgcccaggccatcaccacagctgcagccaaccccatcctcacacagattcaccttttttcaccccacacttgcagagctgctggaggtgaggtcaggtgcctcccagccctgcccagagtatgggcactcaggtgtgggccgaacctgatacctgcctgggacagccactggaaacttttgggaactctcctcgaatgtgtgggcccaaggcccccacctctgtgacccccatgtccttggacctagaggattgtccaccttctgccaaggccagcccacacagcccgagccccttggggagcagtggccg

SEQ ID NO: 379 - DNA, 1506 bp; single-stranded, linear
  immediate source library: FIBRANT01
  immediate source clone: 150135
ccacccctccaccccacctcccccagcttcagggaccagagggctcatatcacaggcccccttaagatggcctgggcagacagaggtggctagaagggcagcctctttcttgccccatggggctgaggcacagaggccgagggctgccgagggctggcctggtggtcgacggacacaagcacctgcagatcaaactgccagactttacacactccagcttttgtctctggactggaacggggctggggctctcccagcatctgccaactgggggctgctccctgcccatggggcacctgggtggcccctgggcctcttgacttgagattctaccttctcggcccttccctctccccccatcattgtgccgtctctgttgcattctgaccctcccgcctggggggtgggggcgttgcctcaacacctcccccatccctgttccctgtcctggggagggatagagtccaccccagagcccggaggctgggcctggccctggccctgcactgatttctcatgtgtccttcgggaaaagggggagtgagagtgggaaaaagggagagttcaggacacctggtccccagctccccattgcctggggcagcagccctcaatttctccttgtgcctcccctcttccaggtgccaaatagccataacctcgtcttggaactgttatgtggcctctctggggtccaggtttcctggtcaagcctgggaatgccagggaggaaagggggtctggctacagcgaccctggtcttaggcaaggggaacatttctccctggagagtcaggtcctatcctgtgctgccctgtctgcccagcccagggcgatgcctggaagcctactgacattgcagggagtcagcctcgcccccaccccctactggttttccaatgttttgactggagggcaaaattttactactactcatctttttggagaccagggctgccctgctggcagcctgccttctaagtgaaatcgactctgtttccccactttaaccccaaattggggcttggaccaagggaggtgagaccacctcccccaggtcccctcccctttcaaaatccatctcattttgccacttcatgcccctgccctaactgggtttttgttcattttttaaaaacagaccacccatcccatccgttttggcttcttgtcccctgtaaatagaccatgacttcgatcagtatttcttgtccccaccccttcctatccccagatgtgcccccatcccctgaaggagctggctgtctcagtcctgggctcgcgcacttcaccccggcagatggagggggcggaaccgggtgggcggggccgcttcgggctgcttgggccagcggccacccctgcccagccgtcgggagggccgcatctctgtatataatatatatatgtatgtattgttcccggttttgtacggaccatgccctctgtcaggtcgtccccataaaagcagncnncagagagnaaaanngaangangggagggttg

SEQ ID NO: 380 - DNA, 365 bp; single-stranded, linear
  immediate source library: BRAITUT07
  immediate source clone: 1503740
gcccccgcatgacacccagcgacctgcgcaacctngaagagctggtganggagattctgggccgctgcacctgccctgaccagtttcccatgatcaaggtctcagaggggaagtaccgtgtgggggactcgagcctgctcatctttgtgcgggtgctgaggagccacgtgatggtgcgagtgggtggtggctgggacacgctggagcattacctggacaagcacgacccgtgccgctgctcctccactgctcatcgcccaccccagccgagggtctgcaccttttctccacagagggtgtcgcccaccaccagtccccgccctgctagcccagtccctgggagtgagcgccggggctcccggcct

SEQ ID NO: 381 - DNA, 2217 bp; single-stranded, linear
  immediate source library: BRAITUT07
  immediate source clone: 1506007
cccccatggtggaccagagcgagctggcctggaggctgctgagccggcgccacggggcacagctctgctacacgcccatgctgcatgcccaggtctttgtccgcgacgccaactaccggaaggagaacctgtactgcgaggtgtgccccgaggaccggcccctcatcgtgcagttctgtgccaatgacccggaggtgtttgttcaggcggctctcctggctcaggattactgtgacgccattgacctgaacttgggctgcccacagatgatagccaagagaggtcactatggcgcctttctgcaggacgagtgggacctgctccaaagaatgattttgctggcccacgagaaactctctgttcctgtcacgtgcaaaatccgtgtcttcccggagattgacaagaccgtgaggtacgcccagatgctggagaaggccggctgccagttgctgacggtgcacggacgcaccaaggagcagaaggggcccctgtcgggtgcagcgtcctgggaagcatatcaaggctgtgcggaaggctgtggccatccctgtgtttgctaacgggaacatccagtgcctgcaggacgtggagcgctgcctccgggacacgggtgtgcagggcgtcatgagcgcagagggcaacctgcacaaccccgccctgttcgagggccggagccctgccgtgtgggagctggccgaggagtatctggacatcgtgcgggagcacccctgccccctgtcctacgtccggtggggcctgccccanaacctcttcaagctgtggcaccacacgctgcaggtgcaccaggagctgcgagaggagctggccaaggtgaagaccctggagggcatcgctgctgtgagccaggagctgaagctgcggtgtcaggaggagatttccaggcaggagggagcgaagcccaccggcgacttgcccttccactggatctgccagccctacatccggccggggcccagggaggggagcaaggagaaggcaagtttcgcgcanaaagcgggcccttggccttggaccctgtgggcaggaaaactgctccccttgtccctgcctgggggtaggacagataaggctgctcgtcctgcggcggccccccagcccacctgcttcctatccgtttcctgcaggatggtgccccctgcatcccctcacccattgctcacggaaggaaaagcagacgtggccagcctgcatcctctgccctccctgagcctcctggcctggctggccacagctggcatggacgccatcagcaggctccgtgcaggcggacggggcagcccccacagccagggcaccctggccctcactcaccagcacccttttgttcttttcctagcaaaatatgcaaagtgtgaccagtgtggaaacccaaaggtgagtgggttccggctgcaagcaccaaggcttcagctttgggggtgggcagggtggtctctgcactgcttggggtggcaggtctggtgcccgcccagctgggtttgcaacgtggctcaaggtggcatggatgcctcaggacggccccttgcttccagccaagcccctgcccaggcctggaggggaagagagtctgggtgggttggggtgagggagaggcatctggcttgggagcagttcccagggctgcatccaggccgtgggcatctggcagaggcttccccagtggggctgctcccctgctggccagcctggccccgggagtggtgctggccacaggctcccgagatttcctgtgcccagggcaacagatgtgtgttcagcctgtgccgcggctgctgcaagaagcgagcctccaaagagactgcagactgcccaggtcacggattgctttttaaaaccaaattggagaagtctctggcctggaaagaggcccagcctgagctgcaggagcctcagccagcagcacctggaacaccaggtggcttctccgaagtcatgggcagtgccctggcctgaaggcccacaacccccacccccaggactgctgctggagcctggacacgtcctacttaagaaaatgccttttactcagggaatctcctgctacttaatgtggaaagacacgcccatgtcccccttcggcccactctgggggcctggaaatgctgcagtggggagcaggccccagggttngacctgccctgtcctcagcacgcgtgtgcaaaagtgaacaataaatcatttcaaagatgcgagagc

SEQ ID NO: 382 - DNA, 2610 bp; single-stranded, linear
  immediate source library: LUNGNOT14
  immediate source clone: 1508778
gctctcatttcactcttcagtgttcctgttatttatgaacggcatcaggcacagatagatcattatctaggacttgcaaataagaatgttaaagatgctatggctacacncaaagcaaaaatccctggattgaagcgcaaagctgaatgaaaacgcccaaaataattagtaggagttcatctttaaaggggatattcatttgattatacgggggagggtcagggaagaacgaacctgacgttgcagtgcagttttcacagatcgtgttagatcnttatttttaggccatgcactgttgtaatgaaaaattacctgtcttgactgccatgtgttcatcatcttaagtattgtaagctgctatgtatggatttaaaccgtaatcatatctttttcctatctaatctatctgaggcactggtggaataaaaaacctgtatattttactttgttgcagatagtcttgccgcatcttggcaagttgcagagatggtggagctannnnnnnnnnnnnnnnnncccttttcagtttgtgcactgtgtatggtccgtgtagattgatgcagattttctgaaatgaaatgttttgtttagacgagatcataccggtaaagcaggaatgacaaagcttgcttttctggtatgttctaggtgtattgtgacttttactgttatattaattgccaatataagtaaatatagattatatatgtatagtgtttcacaaagcttagacctttaccttccagccaccccacagtgcttgatatttcagagtcagtcattggttatacatgtgtagttccaaagcacataagctagaagaagaaatatttctaggagcactaccatctgttttcaacatgaaatgccacacacatagaactccaacaacatcaatttcattgcacagactgactgtagttaattttgtcacagaatctatggactgaatctaatgcttccaaaaatgttgtttgtttgcaaatatcaaacattgttatgcaagaaattattaattacaaaatgaagatttataccattgtggtttaagctgtactgaactaaatctgtggaatgcattgtgaactgtaaaagcaaagtatcaataaagcttatagacttaaaaaaananaaannngaaacatcagtaggagactgcagacttcggttgaggaaacgggtatttcatgtctcagggagtaggtttgtgcagttacagcttttctgttggtatgcataattaataattggagctgcaaagcagatcgtgacaagagatggacggtcagaagaaaaattggaaggacaaggttgttgacctcctgtactggagagacattaagaagactggagtggtgtttggtgccagcctattcctgctgctttcattgacagtattcagcattgtgagcgtaacagcctacaattgccttggccctgctctctgtgaccatcagctttaggatatacaagggtgtgatccaagctatccagaaatcagatgaaggccacccattcagggcatatctggaatctgaagttgctatatctgaggagttggttcagaagtacagtaattctgctcttggtcatgtgaactgcacgataaaggaactcaggcgcctcttcttagttgatgatttagttgattctctgaagtttgcagtgttgatgtgggtatttacctatgttggtgccttgtttaatggtctgacactactgattttggctctcatttcactcttcagtgttcctgttatttatgaacggcatcaggcacagatagatcattatctaggacttgcaaataagaatgttaaagatgctatggctaaaatccaagcaaaaatccctgggttgaagcgcaaagctgaatgaaaacgcccaaaataattagtaggagttcatctttaaaggggatattcatttgatttatacgggggagggtcagggaagaacgaaccttgacgttgcagtgcagtttcacagatcgttgttagatctttatttttagccatgcactgttgtgaggaaaaattacctgtcttgactgccatgtgttcatcatcttaagtattgtaagctgctatgtatggatttaaaccgtaatcatatctttttcctatctatctgaggcactggtggaataaaaaacctgtatattttactttgttgcagatagtcttgccgcatcttggcaagttgcagagatggtggagctagaaaaanaaagaaaaagagcccttttcagtttgtgcactgtgtatggtccgtgtagattgatgcagattttctgaaatgaaatgtttgtttagacgagatcatacccggtaaagcaggaatgacaaagcttgcttttctggtatgttctaggtgtattgtgacttttactgttatattaattgccaatataagtaaatatagattatatatgtatagtgtttcacaaagcttaggacctttaccttccaccaacccacaagtgcttgataattcaaaggtcaagtcaatgggttatacaatgtgtaggtttccaaaggcaccaataaggctagaagggaggaatatttctagggggcactaaccatctgtttttaaacatgaaatggc

SEQ ID NO: 383 - DNA, 873 bp; single-stranded, linear
  immediate source library: FIBRANT01
  immediate source clone: 150993
agttgacatggtcaatgaagaaataggcaaacagcaaaaagttgcagtcatacaccaaatgaaagaagatcaaagcaaaatccctgaaggaatccaagttgactctgacgggctaatcaccataacaactcccaataaacttgccacgctcagtgttcgagccatgccccttccagaagaagtcacccagattctggaagaaaatagtgatttgattcgttctatggagcagttgacatcctctttgaatgagggcgaaaatactcacatgattcatcagaagacccaagagaaaatttgggaattcaaaggaaaactggagcaacacctaacagggagaagatggaggaacatttgttgaccaaatctggtcatttggcccaagaaaatgtgggcccaacatactagtcaataaaagtgaagattttcagaactcagtatggacaggtccagctgacaaagcttcaaaagaagccagtagataccgagatttgggcaatagcattgtgagtggcttccaactagcaaccctctctggccccatgtgtgaggagcctctcatgggtgtctgttttgttctggaaaaatgggacctaagtaaatttgaggaacaaggagcaagtgatctggcaaaagagggacaggaggaaaatgaaacctgttctggtggaaatgaaaaccaagagctacaagatggctgctctgaggcctttgagaagaggacatcacagaaaggagaatctccactcactgactgctatggacctttctcaggacagctaattgccaccatgaaagaagcatgtcgctatgcactgcaagtgaaacctcagcgcctgatggcagctatgtacacatgtgacatcatggcca

SEQ ID NO: 384 - DNA, 2256 bp; single-stranded, linear
  immediate source library: LUNGNOT14
  immediate source clone: 1511256
caacatggcgccgtccacgccgctcttgacagtccgaggatcagaagggctgtacatggtgaatggaccaccacattttacagaaagcacagtgtttccaagggaatctgggaagaattgcaaagtctgtatctttagtaaggatgggaccttgtttgcctggggcaatggagaaaaagtaaatattatcagtgtcactaacaagggactactgcactccttcgacctcctgaaggcagtttgccttgaattctcacccaaaaatactgtcctggcaacgtggcagccttacagtacttctaaagatggcacagctgggatacccaacctacaactttatgatgtgaaaactgggacatgtttgaaatctttcatccagaaaaaaatgcaaaattggtgtccatcctggtcagaagatgaaactctttgtgcccgcaatgttaacaatgaagttcacttcttttgaaaacaacaatttttaacacaattgcaaataaattgcattttgcaaaaaattttcatttaatttactcttttttttagacacaattgcaaataaattgcatttgcaaaaaattaatgattttgtattatcacctggaccccaaccatacaaggtggctgtctatgttccaggaagtaaaggtgcaccttcatttgttagattatatcagtaccccaactttgctggacctcatgcagctttagctaataaaagtttctttaaggcagataaagttacaatgctgtggaataaaaaagctactgctgtgttggtaatagctagcacagatgttgacaagacaggagcttcctactatggagaacaaactctacactacattgcaacaaatggagaaagtgctgtagtgcaattaccaaaaaatggccccatttatgatgtagtttggaattctagttctactgagttttgtgctgtatatggttttatgcctgccaaagcgacaattttcaacttgaaatgtgatcctgtatttgactttggaactggtcctcgtaatgcagcctactatagccctcatggacatatattagtattagctggatttggaaatctgaggggacaaatggaagtgtgggatgtgaaaaactacaaacttatttctaaaccggtggcttctgattctacatattttgcttggtgcccggatggtgagcatattttaacagctacatgtgctcccaggttacgggttaataatggatacaaaatttggcattatactggctctatcttgcacaagtatgatgtgccatcaaatgcagaattatggcaggtttcttggcagccatttttggatggaatatttccagcaaaaacaataacttaccaagcagttccaagtgaagtacccaatgaggaacctaaagttgcaacagcttatagacccccagctttaagaaataaaccaatcaccaattccaaattgcatgaaagaggaaccacctcagaatatgaaaccacaatcaggaaacgataagccattatcaaaaacagctcttaaaaatcaaaggaagcatgaagctaagaaagctgcaaagcaggaagcaagaagtgacaagagtccagatttggcacctactccttgccccacagagcacaccacgaaacacatgtctctcagtcaatttctggggaccctgagatagacaaaaaaatcaagaacctaaagaagaaactgaaagcaatcgaacaactgaaagaacaagcagcaactggaaaacagctagaaaaaaatcagttggagaaaattcagaaagaaacagcccttctccaggagctggaagatttggaattgggtatttaaagattcacggaaagcaagttgatgaccagaaatcagtgcaaacacatcttctgttaaacccattggtattacacagactattcctgtgcccacacttaatgtcaatctataattttaaccatttatccaagattctactaagtgtaaaattatttaataatgtctattaaattgatatttatatcttgcatcctatatcatgtcaatatgtgatatagaaaagagatacgtgaattttttagctaagcttgacagattgaaagacaagtgtcatttttttttgtagagggtgatatataccatgtaaatgaataaaggcattttaaatttaatcactgtttttattataaggtccntagttcagatatccnttattaatttataaggtgtgtaaactacttaatctcacaagctctatggagtaatt

SEQ ID NO: 385 - DNA, 196 bp; single-stranded, linear
  immediate source library: PANCTUT01
  immediate source clone: 1516618
ccaaaaacgacagcaaaccttactgatcctaaccccagaggctccctgctctcattttagctttcttagggtaccttgctgtcttgacaaatcctaatgtcacgcctacagccccaacacaagctccagtcttcctcttcggcatgccctggaagcttcttggcctcagctccccttccccgctcagcaccctgtt

SEQ ID NO: 386 - DNA, 693 bp; single-stranded, linear
  immediate source library: FIBRAGT01
  immediate source clone: 151873
cagcctcccaaaatggtgggattacaggtgtgtgggccaccgtgcctggctgattcagcattttttatcaggcaggaccaggtggcacttccacctccagcctctggtcctaccaatggattcatggagtagcctggactgtttcatagttttctaaatgtacaaattcttataggctagacttagattcattaactcaaattcaatgcttctatcagacttcagttttttgtaactaatagatttttttttccacttttgttctactccttccctaatagctttttaaaaaaatctccccagtagaggaaacatttggaaaagacagaaaactaaaaaggaagaaaaaagatccctattagatacacttcttaaatacaatcacattaacattttgagctatttccttccagcctttttagggcagattttggttggtttttacatagttgagattgtactgttcatacagttttataccctttttcatttaactttataacttaaatattgctctatgttagtataagcttttcacaaacattagtatagtctcccttttataattaatgtttgtgggtatttcttggcatgcatctttaattccttatcctagcctttgggcacaattcctgtgctcaaaaatgagagtgacggctggcatggtggctcccgcctgtaatcccagtactt

SEQ ID NO: 387 - DNA, 200 bp; single-stranded, linear
  immediate source library: BLADTUT04
  immediate source clone: 1520835
tcttgagcccccaggagccagggatgtggaggcgcantgcggcggctgcaggaggagaggacgtgcaaggtgtgcctggaccgcgccgtgtccatcgtctttgtgccgtgcggccacctggtctgtgctgantgtgccccgggcnnnaancttncccccatttgnaaggcccccntttccnnaaaacggntttggaaact

SEQ ID NO: 388 - DNA, 1917 bp; single-stranded, linear
  immediate source library: BLADTUT04
  immediate source clone: 1522948
gctctggcccggcgtgtagcgggcgcactacggggacgctgggccgggcaccgggctgtgtggagaagtgagcgcgctcgtctgacccccgtgcccgccaccccgagccactaacggcgatctcccaaggcctgcccgaggcctctgtcctctgtcctcagccccgcagcggcaacgtcttgcactcggcgagctcgccgctcccgaccctcccgcgcccccgccctgccgcgctgctccccgcccagccgcgggtctgtggtccaagccgccccgagcggcgggactgggagcgggcgcgggagccgacncgagccgagccgagccgagccgagccggagcgggcggcgaaggccggcgcggcgagcagcaaccatgtcggtgttcgggaagctgttcggggctggagggggtaaggccggcaagggcggcccgaccccccaggaggccatccagcggctgcgggacacggaagagatgttaagcaagaaaccaggagttcctggagaagaaaatcgagcaggagctgacggccgccaagaagcacggcaccaaaaacaagcgcgcggccctccaggcactgaagcgtaagaagaggtatgagaagcagctgggcgcagatcgacggcacattatcaaccatcgagttccagcgggaggccctgggagaatgccaacaccaacaccgaggtgctcaagaacatgggctatgccgccaaggccatgaaggcggcccatgacaacatggacatcgataaagttgatgagttaatgcaggacattgctgaccagcaagaacttgcagaggagatttcaacagcaatttcgaaacctgtagggtttggagaagagtttgacgaggatgagctcatggcggaattagaagaactagaacaggaggaactagacaagaatttgctggaaatcagtggacccgaaacagtccctctaccaaatgttccctctatagccctaccatcaaaacccgccaagaagaaagaagaggaggacgacgacatgaaggaattggagaactgggctggatccatgtaatggggtccagcgctggctgggcccagacagactgtggtggcctgcgcaggangcaggcgtgtgcgtgtgtggggcaggcaggatgtggtgcaggcaggttccatcgctttcgactctcactccaaagcagtagggccgcgttgctgctcactctctgcatagcatggtctgcacctgggagatgggacggggggaggggggcgggcggggtgggaagtgcctgctgtttataatgttgaatttctgtaaaataaactgtatttgcaaatccaacattgagcttctggactacgcttgactccactgctgaatcctcaatggaaagggtcgactggttgcagttgaaatgacctgaaatgtagcctctgtccttgtaagtcagttgacttgccgcacatctctttgtgtacttgtacggtactggcagaaaagtcatttttcaaaagccataggcttttccttgcccttagctgtaataatgcatctgattttgatttcctcccagagctgtgtttctgtccatcacctgtgtattggccctgtgtttaccactctggcccactcctcacccccttgctcccctggtcttctggagtttgtgacattgatttgaaatggatggtgttctcttgagagcaagtgagattgttagaattaagttccaactatacagttttctaacatagctataaggtccttgttgctgtttgtgataactgatagataactcattggaaacgtgcatacatttatattcagatgaaattatggtttgcactgtctattaaatatctcgattaattttaaaaaagaaaaaaangggggaaaanaaaaaagannagaaaaaaaggngnngaaaaagtg

SEQ ID NO: 389 - DNA, 211 bp; single-stranded, linear
  immediate source library: UCMCL5T01
  immediate source clone: 1526164
aaagaaaaatgttttctgtttggagatgttaatgtgttgcacattaggaaacgacagttctttattgtgacttgactgctattgtaaatcattttcaagtcagcattacttttaaaacaatctgacaggtaaattattctaattagagcctatatcttcctcagcttcctcagtaccagtagtggggatgggaaaagttggatcaactgtt

SEQ ID NO: 390 - DNA, 247 bp; single-stranded, linear
  immediate source library: UCMCL5T01
  immediate source clone: 1526481
ggctggggggatgtcagcggagtgccctgagcctgggccaggaggtctgcagggccagtccccagggccaggcaggcagtgtccccctcccatcacgcccacctcctggagcctgcccccgtggagggcctacgtggctgccgccgtcctctgctacatcaacctcctgaattacatgaactggttcatcattgcaggagtgctgctggatatacaggaggttttccagatcagtgacaaccatgct

SEQ ID NO: 391 - DNA, 1947 bp; single-stranded, linear
  immediate source library: FIBRAGT02
  immediate source clone: 152657
ggctgaaagccattttgtttttcagctcacttcaagggtacctgaagcgaattggcaccaaagcagcagctgtattgccgcagttctagcttcaccttccacgatgtttcccttggtcaaaagcgcactaaatcgtctccaagttcgaagcattcagcaaacaatggcaaggcagagccacacagaaacgtacacctgattttcatggacaaatacgggtaatgctgtatttagctagtggagccactttncttgtattgttacatggacatatgtagcaacacaagtcggaatagaatggaacctgtccccttgttggcagagttaccccaaaggaatggaggaatcagtaatcatcccagctggtgtaataatgaattgtttaaaaaacagctcataattgatgccaaattaaagcactgtgtacccattaagatatggcattattgaagaaataaagtacatttgaaaccttcaaaaagccagggtaaccctggatgcagctccctaccaggcaagagatccgagtgaggaacctgttcaatgtggtggactgcaagctccattggcagaagaacggagactacttgtgtgtgaaagtagataggactccgaaaggcacccagggtgttgtcacaaattttgaaattttccgaatgagggagaaacaggtacctgtggatgtggtcgagatgaaagaaaccatcatagcctttgcctgggaaccaaatggaagtaagtttgctgtgctgcacggagaggctccgcggatatctgtgtctttctaccacgtcaaaaacaacgggaagattgaactcatcaagatgttcgacaagcagcaggcgaacaccatcttctggagcccccaaggacagtttcgtggtgttggcgggcctgaggagtatgaacggtgccttagcgtttgtggacacttcggactgcacggtcatgaacatcgcagagcactacatggcttccgacgtcgaatgggatcctactgggcgctacgatcgtcacctctgtgtcctggtggagccataaggtggacaacgcgtactgggctgtggactttccaggggacgcctcctgcagaagaacaacaaggaccgcttctgccagctgctgtggcggccccggcctcccacactcctgagccaggaacagatcaagcaaattaaaaaggatctgaagaaatactctaagatctttgaacagaaggatcgtttgagtcagtccaaagcctcaaaggaattggttggagagaaggcgcaccatgatggaagatttccggtaagtaccggaaaatggcccagggagctctatatggagcagaaaaacgagcgcctgggagttgcgaggaggggtggacactgacgagctggacagcaacgtgggacgactggggaagaggagaccattgagttcttcgtcactgaaagaaatcattcccctcgggaatcaggagtgacctggagcactgtgcgcaccgtgtgtgctgtggagccgaggccgtcctgcaggaagccgcgtgactcccgcctcctccctgtgctctctggctctggactgtgactgcgcctggattgtgccattgcgacacatttttgtgcctttcagcccctggtgtctgcagtgggggatttaaggcacccgcttccacttctttcttgtttggagttttctgttggaaccgccggcgttggctccgaagacttagcgacgccactggcggcaccttctcctgcgcccagtgatgtttccacggtgcctgtacacagccgagcagcatttccgttgaaggacttgcatccccattgcgggcagtgctggacgtgtcccggagacccaccgggagggcgccgccatgccttgtacccccaccgtgcaggttgtggccggttttctccgcaggttgaacatggaaataaaagcaaacttgtatgaaaa

SEQ ID NO: 392 - DNA, 329 bp; single-stranded, linear
  immediate source library: FIBRAGT02
  immediate source clone: 152887
ggagaggaacaggaagagagaagctgggagaatcgggaacctgggggctagtgacctgcacacagggcaggggcactcggcagttcccagaggccacccctcccaccccagacatccagacatctggaactttgggtgccaagagtccagcttaatgcaggcagcctggcttttgggggctttggtggtcccccagctcttgggctttggccatggggctcggggagcagagagggagtgggagggaggctggggaggttcccaggnggaggagcgggagaggnnggccctcatnctnangcatctncaggaagncctagaactntctc

SEQ ID NO: 393 - DNA, 1834 bp; single-stranded, linear
  immediate source library: SPLNNOT04
  immediate source clone: 1531886
ggcgagagcgcggagggcgcgcgtgcgcattggcgcggggaggagcagggatcttggcagcgggcgaggaggctgcgagcgagccgcgaaccgagcgggcggcgggcgcgcgcaccatgggggagaaacccgggaccagggtcttcaagaagtcgagccctaactgcaagctcaccgtgtacttgggcaagcgggacttcgtagatcacctggacaaagtggaccctgtagatggcgtggtgcttgtggaccctgactacctgaaggaccgcaaagtgtttgtgaccctcacctgcgccttccgctatggccgtgaagacctggatgtgctgggcttgtccttccgcaaagacctgttcatcgccacctaccaggccttccccccggtgcccaacccaccccggccccccacccgcctgcaggaccggctgctgaggaagctgggccagcatgcccaccccttcttcttcaccataccccagaatcttccatgctccgtcacactgcaggcaggcccagaggatacaggaaaggcctgcggcgtagactttgagattcgagccttctgtgctaaatcactagaagagaaaagccacaaaaggaactctgtgcggctggtgatccgaaaggtgcagttcgccccggagaaacccggcccccagccttcagccgaaaccacacggcacttcctcatgtctgaccggtccctgcacctcgaggcttccctggacaaggagctgtactaccatggggagcccctcaatgtaaatgtccacgtcaccaacaactccaccaagaccgtcaagaagatcaaagtctctggtaggagtgagacagtacgccgacatctgcctcttcagcaccgcccagtacaagtgtcctgtggctcaactcgaacaagatgaccaggtatctcccagctccacattctgtaaggtgtacaccataaccccactgctcagtgacaaccgggagaagcggggtctcgccctggatgggaaactcaagcacgaggacaccaacctggcttccagcaccatcgtgaaggagggtgccaacaaggaggtgctgggaatcctggtgtcctacagggtcaaggtgaagctggtggtgtctcgaggcggggatgtctctgtggagctgccttttgttcttatgcaccccaagccccacgaccacatccccctccccagaccccagtcagccgctccggagacagatgtccctgtggacaccaacctcattgaatttgataccaagctatgccacagatgatgacattgtgtttgaggactttgcccggcttcggctgaaggggatgaaggatgacgactatgatgatcaactctgctaggaagcggggtgggaagaagggaggggatggggttgggagaggtgagggcaggattaagatccccactgtcaatgggggattgtcccagcccctcttcccttcccctcacctggaagcttcttcaaccaatcccttcacactctctcccccatccccccaagatacacactggaccctctcttgctgaatgtgggcattaattttttgactgcagctctgcttctccagccccgccgtgggtggcaagctgtgttcatacctaaattttctggaaggggacagtggaaaagaggagtgacaggagggaaagggggagacaaaactcctactctcaacctcacaccaacacctcccattatcactctctctgcccccattccttcaagaggagaccctttggggacaaggccgtttctttgtttctgagcataaagaagaaaataaatcttttactaagcaaanaaananaaaanananaaa

SEQ ID NO: 394 - DNA, 227 bp; single-stranded, linear
  immediate source library: SPLNNOT04
  immediate source clone: 1532102
acctgtttatcttagcagagctttttctccccaggcattcattatcttattgggcaaaatctaccaatctcccagtcacctcagtgaagagcatgcaatgaaaaataatagtagctcctaatcaagatttttaaaaaattcattgaagaagtatttattgagcagctattgattatgcccaaaagaagtttaaagcttggtgccagacctcaaggctcattggattt

SEQ ID NO: 395 - DNA, 376 bp; single-stranded, linear
  immediate source library: THP1PLB02
  immediate source clone: 153338
tcctgcttcgacatctccttggtcctcagcagcaaccagaagctggttggagctggacctgagtgacaacgccctcggtgacttcggaatcagacttctgtgtgtgggactgaagcacctgttgtgcaatctgaagaagctctggttggtcagctgctgcctcacatcagcatgttgtcaggatcttncatcagtattgagcaccagccattccctgaccagacctctatgtgggggagaatgccttgggagactcaggagtcgcaattttatgtgaaaaagccaagaatccacagtgttaccctgcagaaactggggttgggtgaatttattggncttacggacaancntgtngttcanggttttgtcctcgggg

SEQ ID NO: 396 - DNA, 509 bp; single-stranded, linear
  immediate source library: THP1PLB02
  immediate source clone: 153423
cagcaataaccgagtatgacaattcttaattgtttacattttataacttcctgtccttcaaaagagtttgaaatgtcattttgggaaaagagagccagtcaagctagtaggctgattgtgaagaaaatctaataccttatctttatctcaaacctctgtacaactttattttcattgatgggatactttannnnnnnnnnnnnnnnnnnnnnnntttaaaatatgagtgattatgacctctttggggatcatgcttcaaaaagtcagaaacctagagacaaaactgtcattgatttttaagaagaaacacactaggtcaaaagaagatgtcctggaaatacgaagtactctttaaaaaccatgcatttggagaaagtaattgtttccttgaaaaacatgattaaaaactaaaactgggatgttcctgtgtgtacacagtgccaaatggttttccctttttatgttgtgttttagaaacagcacgaaagttttttccattttaaagtgag

SEQ ID NO: 397 - DNA, 2492 bp; single-stranded, linear
  immediate source library: SINTTUT01
  immediate source clone: 1538925
ctgtaacctgctgctgcttttagtcctcctcacctcagatcggaatcaatggagtggagacccagaggatacattttaattccagtaatggtaggtagatttgtcctggctttctaaaacatctcctcatttcatatttccactccatattgaattccataagggaaaattaatgggtgtttcctcctttagggaggtaatgcaaagagtgtggaacatcttctaatcttgaggaacagtagttgatttcccttgaaggagcttacatattgactgttttcacaataacctgtttgccccagttcaatcctcattttaatacttaatttggtactggctcaaatagcattttcttacagataacaaatcaagagtgaaatttgaggttatactccagtaaagtttttaacacttgtgaatatggtcagctagactaaacttgactcttttttttaatggcttttttatctgtgaacattcagataagtgggattttcaagtactggttggggatggggaatcgtgcttttctttaaacttcagtttacgagatgctttgagagcgttaggcaaaagcagaaataaatatcaggagcaacggggaaagctttataaaagatcatggtggccactgttgcagctttgaagaatgagtgctggcttgaacagttctttgcctgcatcattggtagctgcactgaaaggaaaaaactttcaccttaagaatttgaaaaggaagaaacctgggctctggtcttcatggcatttagactgagatgcttaaacagaacagaagtaatacgcatttcctgccataggatagggaaaatgtaacaagctggttgctcttgaggttagaaaattgtctgtttctctgtggatgaagctggatttacttgaaaatggagagttggcttattgtttgaatattgggacatcaagctatctatagccaagtttcagtcgcaaccagttttccctttgtctggggtaaattcgatacaaaatgattctttttgaatcctgaatccataaattacacttttttttttcaaattcacaaaattcacagtggtgctgactgtgtaataaccactattgggaaacatcccgtaaacctgcctgttgccatgccaatggagtgactgaactggtgacatctgtttgagcatgctttgtgtggctggtagaatgggcaccgttgtgcatacactttgtacatcaggggtgaagggagggttttctagattattgggggagggtaaaattgggatttttttgttgttccttttttgatggggtgtgggggtatagtactcagcttatgccctaaaataacatgtataaaaacccctgaagtattgtgtgggtgtgtacgtgtgagtgtgtgtttgtatacgtctggcaattaaagctttgtcttctggaacttagtgaattcttttctctttttcctccagaaagtatttgttacaagatttgtaaataagagctctacttagtttgtttaccatgaacatgttgcagcaaaccttatgcatctaattcctacaaggttaaagaaaggcttttagacttgccaggttaagcaacagccaagttctcagtaattgtttgccttgatttatcttttagacttcattttgccagctctaaaactcccagtcttccttgattttagtccttaatcttttatgttctgagcaggaagggtaaaagacaggaacctgcttcactgtattaactagtccgtgggctgagaccggggcatctcttttcttcatactgcaatgttgctagatacatgatcagacaccagagggttgggcattcttgcaataccttaacagtgctgaaatctgcagcatggtactaaggaagttaaagttttgaatgtaaccactttatttaaaaggtttttttctttaatttaaatgaaatgggggttgaagtgaacatgattttgtttgacccatgttcgtggaattacagatgcaacatgcattggtaggaatcgtgtgatggtctttttgtggtacttaatttttacatatcccagtctctgtatgtatctgcatagacaaagaaaaaacaaactcctgctttgcttttattgaagggtttccaggactgcgtgtctgctcctgagctctgttttaagtatgtgtatcctttgcttgtattttgtattaaaaaaataagaaaaagaagccttttattgttgagcatgttggcattgtcccctttatttttttctctttttgggacatatgaagcaagttattctttttctgtatcttttttttcttttgtaaactttttttttgttttgtttaaaaatggctttataaaagggcttttataacccagatgtgtgctctgtgtacttcttgtaataccttaaagcaaacacactaacttacacagctttgttaatcagctcccagttcagcctgactttgtgggaacttatttccctaataaattattta

SEQ ID NO: 398 - DNA, 759 bp; single-stranded, linear
  immediate source library: THP1PLB02
  immediate source clone: 155094
ggaagggggtcgagtagaaggaccgccgctccggcctcccgcgacttctcgaaggtgggcaggtcccaccttgtggaggatggaggtgaccggggacgccggggtaccagaatctggcgagatccggactctaaagccgtgtctgctgcgccgcaactacagccgcgaacagcacggcgtggccgccttccctgcctcgaagaccctgaggagcaaggcctgtgacattctggccattgataagtccctgacaacagtcaccctggtcctggcagaggatggcaccatagtggatgatgacgattactttctgtgtctaccttccaatactaagtttgtggcattggctagtaatgagaaatgggcatacaacaattcagatggaggtacagcttggatttcccaagantcctttcatgtagatgaaacagacagcggggcagggttgaagtggaagaatgtggccaggcagctgaaagaagatctgtccagcatcatcctcctatcagaggaggacctccagatgcttgttgacgctccctgctcagacctggctcaggaactacgtcagagttgtgccaccgtccagcggctgcagcacacactccaacaggtgcttgaccaaagagaggaagtgcgtcagtccaagcagctcctgcagctgtacctccaggctttggagaaagagggcagcctcttgtcaaagcaggaagantccaaagctgcntttggtnaggaggtggatgcatanacnggggt

SEQ ID NO: 399 - DNA, 2008 bp; single-stranded, linear
  immediate source library: BLADTUT04
  immediate source clone: 1555947
gcgaaggaggtggtggctgcgttgggctccgggaagccgttcgggctggggctgtcggccgcggggcggaggcactcgcgcggggggtaattcggggtctgggttctgntgccgcgcactttccccggattgacttggcctctacttcttgttaaggaaattcatcncttgttttancagatggccccactgcgtgaccttggttcagctgtccatttcctgtgaccatctcattgacaaggacatcggctccaagtctgacccactctgcgttccttttacaggatgtgggagggggcagctgggctgagcttggccggactgaaacgggtgcggaactgctcaagccctgagttctccaagactctacagcttgagtaccgctttgagacagtccagaagctacgctttggaatctatgacatagacaacaagacgccagagctgagggatgatgacttcctagggggtgctgagtgttccctaggacagattgtgtccagccaggtactgactctccccttgatgctgaagcctggaaaacctgctgggcgggggaccatcacggtctcagctcaggaattaaaggacaatcgtgtagtaaccatggaggtagaggccagaaacctagataagaaggacttcctgggaaaatcagatccatttctggagttcttccgccagggtgatgggaaatggcacctggtgtacagatctgaggtcatcaagaacaacctgaaccctacatggaagcgtttctcagtccccgttcagcatttctgtggtgggaaccccagcacacccatccaggtgcaatgctccgattatgacagtgacgggtcacatgatctcatcggtaccttccacaccagcttggcccagctgcaggcagtcccggctgagtttgaatgcatccaccctgagaagcagcagaaaaagaaaagctacaagaactctggaactatccgtgtcaagatttgtcgggtagaaacagagtactcctttctggactatgtgatgggaggctgtcagatcaacttcactgtgggcgtggacttcactggctccaatggagacccctcctcacctgactccctacactacctgagtccaacaggggtcaatgagtacctgatggcactgtggagtgtgggcagcgtggttcaggactatgactcagacaagctgttccctgcatttggatttggggcccaggttccccctgactggcaggtctcgcatgaatttgccttgaatttcaaccccagtaacccctactgtgcaggcatccagggcattgtggatgcctaccgccaagccctgccccaagttcgcctctatggccctaccaactttgcacccatcatcaaccatgtggccaggtttgcagcccaggctgcacatcaggggactgcctcgcaatacttcatgctgttgctgctgactgatggtgctgtgacggatgtggaagccacacgtgaggctgtggtgcgtgcctcgaacctgcccatgtcagtgatcattgtgggtgtgggtggtgctgactttgaggccatggagcagctggacgctgatggtggacccctgcatacacgttctgggcaggctgctgcccgcgacattgtgcagtttggnaccctaccgccggttccagaatgcccctcggggaggcattggcacagaccgtgctcgcagaagtgcccacacaactggtctcatacttcagggcccagggttgggccccgctcaagccacttccaccctcagccaaggatcctgcacaggccccccaggcctaggttcccttggaggctgtggcaagtcctcaatcctgtgtcccagaggtccctctgggccacaacccaacccttctcactctcctcagtgctagcactttgtattttttgatacttttatacttgtttctgcttttgctgctcttgatcccacctttgctcctgacaaccctcattcaataaagaccagtgaagaccaatgctttgccacc

SEQ ID NO: 400 - DNA, 478 bp; single-stranded, linear
  immediate source library: THP1PLB02
  immediate source clone: 156196
atcatggttacaaattatcgaagccaattatcattcctccaatccctaccacaattctacacattctgctgatgtgcttcatgccactgcctattttctctccaaggagaggataaaggaaactttagatccaattgatgaggtcgctgcactcatcgcagccaccattcatgatgtggatcaccctgggagaaccaactccttcctgtgtaatgctggaagtnagctggccattttgtacaatgacactgctgtgctggagagccaccatgcggccttggccttccagctgaccactggagatgataaatgcaatatatttaaaaacatggagnggaattgattatcggacacttcgccaggggnttatcnccatggtcttagccacagaaatgccaaagcanttttagcatgtcaacaaatttgtcaacagnttcaacaaacccttggaacncttnggggaaattgggggactttt

SEQ ID NO: 401 - DNA, 921 bp; single-stranded, linear
  immediate source library: THP1PLB02
  immediate source clone: 156352
ttcactgatttgactagaaacatcaaggaaggaatgaagaacgttgacttttttccagggtaaattatctctgatgcttctttagatttaagagttcataattccatccactgctgagaaatctcctcaaacccagaaggtttaatcacttcatcccaaaaatgggattgtgaatgtcagcaaaccataaaaaaagtgcttagaagtattcctatagaaatgtaaatgcaaggtcacacatattaatgacagcctgttgtattaatgatggctccaggtcagtgtctggagtttcattccatcccagggcttggatgtcaggattataccaagagtcttgctaccaggagggcaagaagaccaaaacagacagacaagtccagcagaagcagatgcacctgacaaaaatggatgtattaattggctctataaactatgtgcccagcactatgctgagcttacactaattggtcagacgtgctgtctgccctcatgaaattggctccaaatgaatgaactacttttcatgagcagttgtagcaggcctgaccacagattcccagagggccaggtgtggatccacaggacttgaaggtcaaagttcacaaagatgaagaatcagggtagctgaccatgtttggcagatactataatggagacacagaagtgtgcatggcccaaggacaaggacctccagccagggttcatttatgcacttgtgctgcaaaagaaaagtctaggttttaaggctgtgccagaacccatcccaataaagagaccgagtctgaagtcacattgtaaatctagtgtaggagacttggagtcaggcagtgagactggtggggcacggggggcagtgggtacttgtaaacctttaaagatggttaattcattcaatagatatttattaagaacctacgc

SEQ ID NO: 402 - DNA, 520 bp; single-stranded, linear
  immediate source library: THP1PLB02
  immediate source clone: 157234
gtgcggaaggccgtgcagtacgaggagaagaacccctgccggaccctttgctgcttctgctgtccctgcctnaagtagcaggccggcccgggccggcaacgtccatcccagaccatggagcgcgctgggaaggacgcaccaaagccgggagctctgccctgcagggagttgccccaaccctttccggaactcagtctttagaaaagaaacgccaggttcaagaattgcaaaccagcctgtgcttggaaagatggttagttgataccgtccgatgattcttcagtaaagatagattcccacaaagttgtgcaatgtcattatatgacaccttgcactcttaccgtcttgacagaagccaagtacaggaactgaagttgtatctgactgtagggtgaatgtctgaggcctgcctcctaataaagactcaaggaggaagtcaattgggcatctgctaatagaatgaactcatgatggaaacttcagttcatttactttgtcctgaaaattccctggttctgtt

SEQ ID NO: 403 - DNA, 223 bp; single-stranded, linear
  immediate source library: LNODNOT03
  immediate source clone: 1573272
cggctcgagaaacatctctggggtttgcttgttcacgaatttcatgaagtgccgctggagagccagagaccagctgcgcaggagccggaggaacgggcaggccgctgacctgaggtctggagaaacccctggagaagggtgtccccaccagcccatacagcgtgtgtgtggagggggccttgacctccgtgatgtctactgtgcctcaggataaggacccgcc

SEQ ID NO: 404 - DNA, 104 bp; single-stranded, linear
  immediate source library: LNODNOT03
  immediate source clone: 1573553
gaaactgagacaggggtgatgtgacttgcccagggtcacatagcaagtaaagtggttgaggccacccgtatagaattctgcttaggaacccaatttttggccgg

SEQ ID NO: 405 - DNA, 240 bp; single-stranded, linear
  immediate source library: LNODNOT03
  immediate source clone: 1574210
ctcatattatgctcccaccatgccagtctacggtaatttaataactttagatatggcaaagttttatatggtttactcaagttttaatttttgttctagcatttagccaaaatcgattgaattcataatattgctaggcactgttttaaaaacgggataaaatgaaaacaaaacaaaacacaaaacaaaagtcttcagtcctttaaaaaaataaaacagcttcctgacacatagttcacc

SEQ ID NO: 406 - DNA, 226 bp; single-stranded, linear
  immediate source library: LNODNOT03
  immediate source clone: 1574415
gcttcactcgccaaggcggcggggccgggaggggccgaacctgtgcgcgattcctgtctgactaaagggacctcaaaaaggagggaaaatggcttctgagtctgaaactctgaatcccagtgctaggataatgaccttttatccaactatggaagagttccgaaacttcagtagatacattgcctacattgaatcccaaggagctcatcgggcagggctagccaag

SEQ ID NO: 407 - DNA, 1813 bp; single-stranded, linear
  immediate source library: LNODNOT03
  immediate source clone: 1574617
cccacaggctacgtgccaaagatgggctttgtcccagtttcatatacaggtcacttggccaaggccacagtccaacctgggttcatccccactgccccgcagagaaaggcaggtcagcgtgtctgcatcccacccaggtgcagaagccatggccggcagccttatgtgggggacagggcaggacactcagcctgtccagagtgcgtatgggcagcccttgcctgggcagtacgggtgaccgagtgcagcagatcgaaagttgcctcggggatgtgcaagatgtggcaggcgaggtgggtggcaggagcccacacctgaggctgttggcatcagccagtccacaggactacaggcagggccaccacctaggctggcctcagcccaccgctccctcctatctctccccaggccctacatggacgcggtcgtctccctggtcactatccatgttggacacgggcctgccctgttttcgcgggccagacaatcaaagttcttgaagtacanttccanggncatgggtctcaacttgaaagtccgtccccatggaagaccctccttccaatggggcaggggagccaagcangggcctggccatggnaacccctgacacaaccttttcttcaaggcacaaggtttaagcccaacatgactgagcgngaaggttgcaaatttcatccatgaaggtcatccagagctgcttcctcagcaacaaggagcggactanaacatccgtaggttacggtcgactggggcgtcgtccctagcccgggagccgggtctctggagtcgcggcccggggttcacgatgtccgacgaggaagcgaggcagagcggaggctcctcgcaggccggcgccgtgactgtcagcgacgtccaggagctgatgcggcgcaaggaggagatagaagcgcagatcaaggccaactatgacgtgctggaaaagccaaaaaggcattgggatgaacgagccgctggtggactgtgagggctacccccggtcagacgtggacctgtaccaagtccgcaccgccaggcacaacatcatatgcctgcagaatgatcacaatgcagtgatgaagcaggtggaggaggccctgcaccagctgcacgctcgcgacaaggagaagcaggcccgggacatggctgaggcccacaaagaggccatgagccgcaaactgggtcagagtgagagccagggccctccacgggccttcgccaaagagaacagcatcagccccggctccccagccagcatcgcgggtctgcaagtggatgatgagattgtggagttcggctctgtgaacacccagaacttccagtcactgcataacattggcagtgtggtgcagcacagtgaggggaagcccctgaatgtgacagtgatccgcagggggggaaaacaccagcttagacttgttccaacacgctgggcaggaaaaggactgctgggctgcaacattattcctctgcaaagatgattgtccctggggaacagtaacaggaaagcatcttcccttgccctggacttgggtctagggatttccaacttgtcttctctccctgaagcataaggatctggaagaggcttgtaacctgaacttctgtgtggtggcagtactgtggcccaccagtgtaatctccctggattaaggcattcttaaaaacttaggcttggcctctttcacaaattaggccacggccctaaataggaattccctggattgtgggcaagtgggcggaagttattctggcaggtactggtgtgattattattantatttttaataaagagtttttcagtgctgatatg

SEQ ID NO: 408 - DNA, 227 bp; single-stranded, linear
  immediate source library: LNODNOT03
  immediate source clone: 1574637
ggaggccgggccctcagcttggcgccagcttgccactgctcgcttgaagccccttcctgcctcgcgtccccttccgccccagcctgggcctgcgcatggggatgtctgtgctcccaactcaacttttgagttcgccgtgttactggccgcccctagggacctgcagcgccgttcggggcagcagcacttccggcggggtcgtggtctggagcgcttccgggtctgca

SEQ ID NO: 409 - DNA, 218 bp; single-stranded, linear
  immediate source library: LNODNOT03
  immediate source clone: 1576661
tctgccttatgaggacacgcatttctctcctccaaaacatgcagcccttaccagtcaactgaacctactggcaacttgattttgaactccccagcctctacaactcattcatacattctgcttttgctgcctgaaacgactcgtctatgtcctgtgctacttgctgccttcatcgttctcactgctgagtgccagcagagcacgccctatggagatta

SEQ ID NO: 410 - DNA, 542 bp; single-stranded, linear
  immediate source library: ADENINB01
  immediate source clone: 158325
gtcagagagaaagaactgactgaaacgtttgagatatataggaaacatcaaaaggtgataaaatttccctagaatctccactatctcaaagatgaagaaagttctcctcctgatcacagccatcttggcagtggctgttggtttcccagtctctcaagaccaggaacgagaaaaaagaagtatcagtgacagcgatgaattagcttcagggttttttgtgttcccttacccatatccatttcgcccacttccaccaattccatttccaagatttccatggtttagacgtaattttcctattccaatacctgaatctgcccctacaactccccttcctagcgaaaagtaaacaagaaggaaaagtcacgataaacctggtcacctgaaattgaaattgagccacttccttgaagaatcaaaattcctgttaataaaagaaaaacaaatgtaattgaaatagcacacagcattctctagtcaatatctttagtgatcttctttaataaacatgaaagcaaagattttggtttcttaatttccac

SEQ ID NO: 411 - DNA, 318 bp; single-stranded, linear
  immediate source library: BRAINOT14
  immediate source clone: 1594362
gtaggatgtgaccgagggaagatactctttgtctcagagtctgtcttcaagatcctcaactacagccagaatgatctgattggtcagagtttgtttgactacctgcatcctaaagatattgccaaagtcaaggagcagctctcctcctctgacaccgcaccccgggagcggctcatagatgcaaaaagtgagtaccagagaggcctcgcatttcctcagcagcccactcacaggcagccaaccctgagtgagcagagggcgggtgtgtgtgatgggctcagcctttccagtcctacttctctgtcctctttctggggc

SEQ ID NO: 412 - DNA, 1407 bp; single-stranded, linear
  immediate source library: ADENINB01
  immediate source clone: 159452
tcactttatttaatgcaaaatacaacaaaatcaagagtaggggaatcaaagcaaatgcattcaaaaaactgnataacctcaccttcctctacttggaccataatgccctgggatccgtgcctcttaatttaccagaaagtctacgtgtaattcatcttcagttcaacaacatagcttcaattacagatgacacattctgcaaggctaatgacaccagttacatccgggaccgcattgaagagatacgcctggagggcaatccaatcgtcctgggaaagcatccaaacagttttatttgcttaaaaagattaccgatagggtcatacttttaacctctattggtacaacatataaatgaaagtacacctacactaatagtctgtctcaacaatgaggtaaaggaacttaagtattggtttaatattaaccttgtatctcattttgaaggaatttaatattttaagcaaggntgttcaaaatcttacatataataagtaaaaagtaagactgaatgtctacgttcgaaacaaagtaatatgaaaatatttaaacagcattacaaaatcctagtttatactagactaccatttaaaaatcatgtttttatataaatgcccaaatttgagatgcattattcctattactaatgatgtaagtacgaggataaatccaagaaactttcaactctttgcctttcctggcctttactggatcccaaaagcatttaaggtacatgttccaaaaactttgaaaagctaaatgtttcccatgatcgctcattcttcttttatgattcatacgttattccttataaagtaagaactttgttttcctcctatcaaggcagctattttattaaatttttcacttagtctgagaaatagcagatagtctcatatttaggaaaactttccaaataaaataaatgttattctctgataaagagctaatacagaaatgttcaagttattttactttctggtaatgtcttcagtaaaatattttctttatctaaatattaacattctaagtctaccaaaaaaagttttaaactcaagcaggccaaaaccaatatgcttataagaaataatgaaaagttcatccatttctgataaagttctctatggcaaagtctttcaaatacgagataactgcaaaatattttccttttatactacagaaatgagaatctcatcaataaattagttcaagcataagatgaaaacagaatattctgtggtgccagtgcacactaacttcccaaccatacacatccatgntcaatggaacaaactgnatatcacataaagctctgggtacanttctgatactcatataactgactggtactgcagattaatctctactgaggtatattatgtgccagtgtgcaggtaagttctaaat

SEQ ID NO: 413 - DNA, 1929 bp; single-stranded, linear
  immediate source library: ADENINB01
  immediate source clone: 159508
ctggctttgattcttctttgagttctcttacttgccacgtacaggaccattatttatgagtgaaaagttgtagcacattccttttgcaggtctgagctaagcccttgaaagcagggtaatgctcataaaaggactgttcccgcggccccaaggtgcctgttgttcacacttaagggaagtttataaagctactggccccagatgctcagggtaaggagcaccaaagctgaggctggctcagagatctccagagaagctgcagcctgccctggccctggctctggccctggcccacattgcacatggaaacccaaaggcatatatctgcgtatgtgtggtacttagtcacatctttgtcaacaaactgttcgtttttaagttacaaatttgaatttaatggttgtcatcaacggcaatgtgtttccctaaagggaagccagtcattgaccatttaaaaagtctcctgctaagtatggaaatcagacagtaagagaaagccaaaaagcaatgcagagaaaggtgtccaagctgtcttcagccttccccagctaaagagcagaggagggcctgggctacttgggttccccatcggcctccagcactgcctccctcctcccactgcgactctgggatctccaggtgctgcccaaggagttgccttgattacagagaggggagcctccaattcggccaacttggagtcctttctgttttgaagcatgggccagacccggcactgcgctcggagagccggtgggcctggcctccccgtcgacctcagtgcctttttgttttcagagagaaataggagtagggcgagtttgcctgaagctctgctgctggcttctcctgccaggaagtgaacaatggcggcggtgtgggagacaaggccaggagagcccgcgttcagtatgggttgagggtcacagacctccctcccatctgggtgcctgagttttgactccaatcagtgataccagaccacattgacagggaggatcaaattcctgacttacatttgcactggcttcttgtttaggctgaatcctaaaataaattagtcaaaaaattccaacaagtagccaggactgcagagacactccagtgcagagggagaaggacttgtaattttcaaagcagggctggttttccaacccagcctctgagaaaccatttctttgctatcctctgccttcccaagtccctcttgggtcggttcaagcccaagcttgttcgtgtagcttcagaagttccctctccgacccaggctgagtccatactgcccctgatcccagaaggaatgctgacccctcgtcgtatgaactgtgcatagtctccagagcttcaaaggcaacacaagctcgcaactctaagatttttttaaaccacaaaaaccctggttagccatctcatgctcagccttatcacttccctccctttagaaactctctccctgctgtatattaaagggagcaggtggagagtcattttccttcgtcctgcatgtctctaacattaatagaaggcatggctcctgctgcaaccgctgtgaatgctgctgagaacctccctctatggggatggctattttatttttgagaaggaaaaaaaaagtcatgtatatatacacataaaggcatatagctatatataaagagcataagggtgtttatgaaatgagaaaattattggacaattcagactttactaaagcacagttagacccaaggcctatgctgaggtctaaacctctgaaaaaagtatagtatcgagtacccgttccctcccagaggtgggagtaactgctggtagtgccttctttggttgtgttgctcagtgtgtaagtgtttgtttccaggatattttctttttaaatgtctttcttatatgggttttaaaaaaaagtaataaaagcctgttgcaaaaatg

SEQ ID NO: 414 - DNA, 940 bp; single-stranded, linear
  immediate source library: BRAINOT14
  immediate source clone: 1596759
gggcagcagagaaaggaagtcctctccctggaggcctatctccctcagaacggcgcgagaagcgagaccttagaaggcagcgcttcccgcgaaggaccggaaaggagcgcctactaaggacgccgtcgaggtccggggcgcctcaactctatagctctaactggctagaagtgcccaacgtggaatgtttcttttttaaaggcggctcttgaagcgacccggaagcggaagtggaagaaagttctagtggcttgagattaagcctgatcaagatggacaacctcccaaaagcaccgaggacttcgtggtcagagcccatgggggtaggaagccagtggggagcctggctggggattggtgaagtcctgggcaagaagctggaggaaaggggttttgacaaggcctatgttgtccttggccagtttctggtgctaaagaaagatgaagacctcttccgggaatggctgaaagacacttgtggcgccaacgccaagcagtcccgggactgcttcggatgccttcgagagtggtgcgacgccttcttgtgatgctctctgggaagctctcaatccccagccctcatccagagtttgcagccgagtagggactcctcccctgtcctctacgaaggaaaagattgctattgtcgtactcacctccgacgtactccggggtcttttgggagttttctcccctaaccatttcaacttttttttggattctcgctcttgcatgcctcccccgtcctttttcccttgccagttccctgggtgacagttaccagctttcctgaatggattcccggccccatccctcacccccaccctcactttcaatccgtttgataccatttggctccttttttggcagaacagtcactgtccttgtaaagttttttagatcaataaagtcagtggctttnaaaaaaaaanaaggaggg

SEQ ID NO: 415 - DNA, 683 bp; single-stranded, linear
  immediate source library: BRAINOT14
  immediate source clone: 1597325
ccctcgtgttcctgggncanactttggggccnccgcgtacccactgcccctatgccgtggccctacccgaggtggccccagcccagccactcaccgaggcactgagggctctctgccacgtggggctctttgacttcgccttttgtgccttgtttgactgcgaccgccctgtggcgcagaagtcttgtgacctccttctcttcctgagggacaagattgcttcctacagcagcctgcgggaggccaggggcagccccaacactgcctccgcagaggccaccctgccgaggtggcgggcgggtgagcaggcccagcccccaggggaccaggagcctgaggctgtgctggccatgctcaggtccctagacctgggagggcctgcggagaacgctggccgagagcagcgaccacgtggagaagagtccccagtccctcctgcaggacatgctggccacgggaggcttcctgcagggggacgaggccgactgctactgagcagaaccagagtctgccactggggctcaggaccaagggaggcagcaccatgtccttctgtgggacactgccagccccagggctccagcccagcccggtggatcctctggggaagccaggaccaggagagaagcaaggtcaagaaatcccacagtttgatgtattaaagaaatgacttatttctactc

SEQ ID NO: 416 - DNA, 2022 bp; single-stranded, linear
  immediate source library: BLADNOT03
  immediate source clone: 1602090
cggcacgagcggcacgagcggcacgaggacgcgcatggccatgtacaagaagagcctccacatcaacggcgggggcagcgcagctgagcagcgtgagaagatcaagcagttctcccagcaggaggagaagaggcagaagtcggagcggctgcagcaacagcagaaacacgagaaccagatgcgggacatgctggcgcagtgtgagagcaacatgagcgagctgcagcagctgcagaatgaaaagtgccacctcctggtagagcacgaaacccagaaactgaaggccctggatgagagccataaccagaacctgaaggaatggcgggacaagcttcggccgcgcaagaaggctctggaagaggatctgaaccagaagaagcgggagcaggagatgttcttcaagctgagcgaggaggcggagtgcccaaacccctccaccccaagcaaggccgccaagttcttcccctacagttctgcggatgcttcttaacaaccgcccggggctgtggctggcagcttggtgggccccagggccttctccttcattctctgtgaacatgtaactcaggaccccttttccctcttgcgtctgtgccagctcaaatccagcccctcgccctgtgccaccccaactgtgcctgatagacctgccccagcgttcctgacttcttgctggcctgtggagggtgaggtgtaattatttgtcacctgaacctaatgtatattctccttgagccccagatcccttcaagctggaagggatggggctgttggtggggtcagggtccaagaggaatgggtgttctgtggcctcgagtcctctcctgtttgcgaaaataccagttttgctctctgtgggacaaagcactgctgatgaagtccccgtgggctcatccgggctggaattcttggtttttcagccattccctgcagagtcactcaatcatcaagtccctcacagccatttctgttcccagaggagccaggcctgcagctggctgctcaggagatggcctcattcctcctgttctcccagtttgctttccacttaagacaaagccttgtctatgtggggggcggggaccggggaaagagggaggctgaaatgtttattctgcttctcccgtgtttcatgccatctcgcgtcccccttcctgcacatgggtgtgaatgcacacacatacgcgtacacacaggacttggtctgctggcctggcctcttctgcccaggtgggttggaacacgtttgctgcctgagcctgtgccactgagcatgttaggtggagcagttggtgtggcacgtgcggggtgttggcaccggaggcatgggaaaagcacaggctgtactgccaggctgcgatgcgtgctggcccccgcacaggctcctgtgtgcagggactgattcctcagcacacgaggcttccacaacccagtctgctccatagcactctggcccaccctgtctgcaggtgaaacaggagggctgtttgcctctgccccatccccccgactgtgttcaggagtcccaccttgcatttcagacctgggctggcagtctgttggacttctcttcaggaagaaaaagcatcagggggaaatggaatgcccctgccccaggaacatggcagaagcacaggttctgtacctcagatggactcctgctgggccttcggggtctcagttggcttcccccagattctgattctacagctgcagaatgtatataacgcaataaaagcaaatgtttgaaccagtatgcgggtttacttacaaggaaaccttttttcaccctgatttctaattattttattgaaacaactataaaatgtatggtttctccaggaagatatctgctttttaaaacaacaaacaagaacaacaacacaaaactggtaatgatttggagtaatcatgcggggcatattgagtctgggtagtgtttcgctggtggtagagtggttgagacttcctgggaggactttttccgccttcactcctacagatttaagattctttattttt

SEQ ID NO: 417 - DNA, 1663 bp; single-stranded, linear
  immediate source library: BLADNOT03
  immediate source clone: 1602848
agaaatcgagatccagaagcagggaaagaaaacggcggatcaggtctcgttcccgctcaagatcaagacacaggcataggactagaagcaggagtaggacaaggagtaggagtcgagatagaaagaagagaattgaaaagccgagaagatttagcagaagtttaagccggactccaagtccacctcccttcagaggcagaaacacagcaatggatcgcacaggaagctttagctagaaggttggaaagggcaaagaaattacaagaacagcgagaaaaggaaatggttgaaaaacaaaaacaacaagaaatagctgcagcagctgcagctactggaggttctgttctcaatgttgctgccctgttgggcatcaggaacacaagtaacacctcagatagccatggcagctcagatggcagccctgcaagctaaagctttggcagagacaggaatagctgttcctagctactataacccagccgctgttaatccaatgaaatttgctgaacaagagaaaaaaaggaaaatggctttggcagggcaagaaagaaggggacaaatcccaatctgctgaaatatgggaaaaattgaattttggaaacaaggaccaaaatgtcaaatttagggaattgatgggtattaagagtgaagatgaagctggatgtagctcagttgatgaagaaagttacaagactctgaagcagcaggaagaagtatttcgaaatttagatgctcagtatgaaatggcaagatcacaaacccacacacaaagaggaatgggtttgggtttcacatcttcaatgcgaggaatggatgcagtttgaaaatgatcacacttgtaaagtttgggacttatagacttcttgttctgatgtcacgtccttgttcaccaaacagctagcactctagcttgcatgggtgttgcattgactttaatttattgaaaaatacaaatttttgtaaatatcagatcagtgatactggtgttagtgttgtaatcaggttaaacccacttccattaaacttgacaggactatagaaggataatatttttaagttcatgaattctacttttcaaatatataaaagctgcaggtggggataaaatctcatacatggattttttcgtgtccgctgtcttgtgtacttttgtacttaaccttgtacagttattttcatctcttgaaacatgaaagaaatgttatgtagatgttctttagaagatctggccatttggtacataatccagcacagataagctgggtggtaatgataataaaaatggttttctcaaaactggtgttaatttaagttacctgggatgtttctttgaatttgttttatagtttctgtagcatttggcaattgctgttagaaaacactagctagaaatcccctccccaccaccctttttaaggccagttaactatactacagtcaataccgtggtgagcaaaaatgtaaaaggtggaaggagaaaacttattaaaatagtatgttttcctattataagggacagacttggtattcagtatttgtcaaatattacatgtgttattcaggagatagattaatgcattaaagggatgtaagcacttttattttaataaagtgccttataacaagttctttgcatgctttttgctcattatccctttgaagg

SEQ ID NO: 418 - DNA, 1072 bp; single-stranded, linear
  immediate source library: BLADNOT03
  immediate source clone: 1603031
agcctccctgggacctgtcttcactgcctggggccctgggagccagggaggctccctgaggctgagtgaacactgggcgctgcacctgcctctcccacgtcctcggccccactcccgcagtgcagctggctggtgacgaaggccggagctgggaccagcagctcccactgggtatggtggtttctctcagggagcctcgtcatcgtcattgtttgctccacagttggcctaatcatatgtgtgaaaagaagaaagccaaggggtgatgtagtcaaggtgatcgtctccgtccagcggaaaagacaggaggcagaaggtgaggccacagttcattgaggccctgcaggcccctccggacgtcaccacggtggccgtggaggagacaataccctcattcacggggaggagcccccaaaaaccactgacccacagactctgcaccccgacgccagagatacctggagcgacggctgctgaaagaggctgtccacctgggcgaaaccaccggagcccggaggcttgggggctccgccctgggctggcttccgtctcctccagtggagggagaggtggggcccctgctggggtagagctggggacgccacgtgccatacccatgggccagtgagggcctggggcctctgttctgctgtggcctgagctccccagagtcctgaggaggagcgccagttgcccctcgctcacagaccacacacccagccctcctgggccagcccagagggcccttcagaccccagctgtctgcgcgtctgactcttgtggcctcagcaggacaggccccgggcactgcctcacagccaaggctggactgggttggctgcagtgtggtgtttagtggataccacatcggaaagtgattttctaaattggatttgaattcggctcctgttttctatttgtcatgaaacagtgtatttggggagaaactgtnggaggntntaaataactngannctncncaaaaaccaannacaacanngtnntatnnggccaggatggtgcaaagnaattaaagatgtnaannagaaatngcaatgagantaaagtggttt

SEQ ID NO: 419 - DNA, 899 bp; single-stranded, linear
  immediate source library: LUNGNOT15
  immediate source clone: 1603383
cacgaaccacagtccatgacaagtctgcncaccaaacacacagctcctggacaccncccaacgcacagtactggtcccagtttcacagcgtgaggccacaggggccccagttgaggnagcagcaacacaacnaaacnaacaagtgctggggtatgctctcctcatgtggcgggcatgggctgactacattgcttcaagtgatgctgtctccccggggtgatnggananggaagaaggtggtgattcantgtggnaancatcctcananactcgtggccgtatcttggtgcatcctggtgccagcactgaggaagttaaacgagctttcttctccaagtccaaagagcagctcctggacaccccccaacgcaaagtactggtcccagtttcacagcgtgaggccacaggggccccagttgaggcagcagcaacacaaacaaaacaaacaagtgctggggtactgcctcctcctcatgctggcgggcatgggcctgcactacattgccttcaggaaggtgaagcagatgcaccttaacttcatggatgaaaaggatcggatcatcacagcccttctacaacgaagcccgggcacgggccaggtctgtccctgctctattctgctccctgctccctgtccaggaaccacacttcgggatccctatcccaaccacccaggtgccctctcctccagggccaacagaggcatccttcagcaggagcgacaacggctagggcagcggcagccgccaccatccgagccaacccaaggccccgagatcgtgccccggggcgccggcccctgaggggctcacctggatggggcctgcagtgcgttcccgctttgcttccttccctggacggcccgctccccgaaacgcgcgcaataaagtgattcgcag

SEQ ID NO: 420 - DNA, 1702 bp; single-stranded, linear
  immediate source library: LUNGNOT15
  immediate source clone: 1606384
ctgaagatgctagaatcatgctgagccgagctgtggagtgctgccccaccagcgtggagctctggcttgctctggcaaggctggagacctatgaaaatgcccgcaaggtcttgaacaaggcgcgggagaacattcctacagaccgacatatctggatcacggctgctaagctggaggaagccaatgggaacacgcagatggtggagaagatcatcgaccgagccatcacctcgctgcgggccaacggtgtggagatcaaccgtgagcagtggatccaggatgccgaggaatgtgacagggctgggagtgtggccacctgccaggccgtcatgcgtgccgtgattgggattgggatttaggaggaagatcggaagcatacctgggatggaggatgctgacagttgtgtagcccacaatgccctgggagtgtgcacgagccatctacgcctacgccctgcaggtgttccccagcaagaagagtgtgtggctgcgcgccgcgtacttcgagaagaaccatggcactcgggagtccctggaagcactcctgcagagggctgtggcccactgccccaaagcagaggtgctgtggctcatgggcgccaagtccaagtggctggcaggggatgtgcctgcagcaaggagcatcctggccctggccttccaggccaaccccaacagtgaggagatctggctggcagccgtgaagctggagtccgagaatgatgagtacgagcgggcccggaggctgctggccaaggcgcggagcagtgcccccaccgcccgggtgttcatgaagtctgtgaagctggagtgggtgcaagacaacatcagggcagcccaagatctgtgcgaggaggccctgcggcactatgaggacttccccaagctgtggatgatgaaggggcagatcgaggagcagaaggagatgatggagaaggcgcgggaagcctataaccaggggttgaagaagtgtccccacttccacaaccctgtggcttttgctctctcggctggaggagaagattgggcagcttactcgagcacgggccattttggaaaagtctcgtctgaagaacccaaagaaccctgggctgtggttggagtccgtgcggctggagtaccgtgccggggctgaagaacatcgccaaatacactcatggccaaggcgctgcaggagtgccccaactccggtatcctgtggtctgaggccatcttcctcgaggcaaggccccagagggaggacccaagagcgtggatgccctgaagaagtgtgagcatgacccccatgtgctcctggccgtggccaagctgttttggagtcagcggaagatcaccaaggccagggagtggttccaccgcactgtgaagattgactcggacctgggggatgcctgggccttcttctacaagtttgagctgcagcatggcactgaggagcagcaggaggaggtgaggaagcgctgtgaagagtgcagagcctcggcatgggcgagctgtggtagcaccgtgtccaaggacatcgccaactggcagaagaagatcggggacatccttaggctggtggccggccgcatcaagaacaccttctgattgagcggttgccatggccggtctccgtggggcagggttgggccgcatgtggaagggctctgagctgtgtcctccttcattaaaagtttttatgtctcgtgtcagaaaaaaa

SEQ ID NO: 421 - DNA, 837 bp; single-stranded, linear
  immediate source library: ADENINB01
  immediate source clone: 160970
gggggggngggngttttaanacgggggcaatttaccaagnnncccctgnggtttgggaaaagncccnncccttttgggnggtggaaacccncnttttctctctnggnggtccccccacccttttccaaggggtttnaaaaacccggngaacngggcttttcaaaaaangccttcaaacnnggatttgggtgccaaatngcaaggtnccccgggtttaaccccttangntncangnagcctnntcncaggtgtttntggggnaaaccccanggntanaaaattttccccnatttctggggctttggttgngctaatgccaaaatgcccctggttaaatntcccaaggnngcctgnatncccccttttttcccttttttttcaatnncaattgtggctcaaacttttggaggctaaggnctttggngaanttttgcccttagnantttaagaccttgttttaagnttaancgtttcttttaancatttgaaacaangtncaaacccggaaagcttttggttgggttgccagggaagctngaagggttgcccccnaagaacttcaagttggggaanccccttgggtttgggggccccccaaanttcttcccccaagccaagggggttcccttccggggtttttcccttccaatttttggttggaaaaaataaaaaattggaangttggggngccccaacggaacggttttaaaattaaaangccccncaaaanggaggaaaacctttngtttggaaaangngttngggttaaagttccccccttttagcncncttnaaaattttngngttggctttcnaaatttacaaangttnttaggt

SEQ ID NO: 422 - DNA, 1673 bp; single-stranded, linear
  immediate source library: COLNTUT06
  immediate source clone: 1610405
tggcgtgaaagttctaggcatattggctatgattgacgaaggggaaaccgactggaaagtcattgccattaatgtggatggatccctggggnnaaaattttggggggggnngngnnttataatgatatcaatgatgtcaaacggctgaaacctggctacttagaagctactgtggactggtttagaaggtataaggttcctgatggaaaaccagaaaatgagtttgcgtttaatgcagaatttaaagataaggactttgccattgatattaattaaaagcactcaatgaccattggaaagcattagtgactaagaaaaacgaatggaaaagggattcagttgcatgaatacaactttgtctgagagccccttcaagtgtgatcctgatgctgccagagccattgtggatgcatttaccaccaccctgtgaatctgccatgcacagtaccaacagacggttgataagtggttccatcaccagaaaaactaatgagatttctctggaatacaagctgatattgctacatcgtgttcatctggatgtattagaagtaaaagtaagtagcttttcaaagctttaaatttgtagaactcatctaactaaagtaaattctgctgtgactaatccaatatactcagaatgttatccatctaaagcatttttcatatctcaactaagataacttttagcacatgcttaaatatcaaagcagttgtcatttggaagtcacttgtgaatagatgtgcaaggggagcacatattggatgtatatgttaccatatgttaggaaataaaattattttgctgaaaaaaagcagtgcgcaggcgtggggctctctccttgtcagtcggcgccgcgtgcgggctggtggctctgtggcagcggcggcggcaggactccggcactatgagcggcttcagcaccgaggagcgcgccgcgcccttctccctggagtaccgagtcttcctcaaaaatgagaaaggacaatatatatctccatttcatgatattccaatttatgcagataaggatgtgtttcacatggtagttgaagtaccacgctggtctaatgcaaaaatggagattgctacaaaggaccctttaaaccctattaaacaagatgtgaaaaaaggaaaacttcgctatgttgcgaatttgttcccgtataaaggatatatctggaactatggtgccatccctcagacttgggaagacccagggcacaatgataaacatactggctgttgtggtgacaatgacccaattgatgtgtgtgaaattggaagcaaggtatgtgcaagaggtgaaataattggcgtgaaagttctaggcatattggctatgattgacgaaggggaaaccgactggaaagtcattgccattaatgtggatgatcctgatgcagccaattataatgatatcaatgatgtcaaacggctgaaacctggctacttagaagctactgtggactggtttagaaggtataagggttcctgatggaaaaccagaaaatgagtttgcgtttaatgcagaatttaaaggtaagggccttttnccattgttattattaaagcactcattgcccatttgnaagcatttagtgncttanaaaccgnatgnnaaaggntcatgttnattgttcaacttttcnttnggcccctcaaagtgtgc

SEQ ID NO: 423 - DNA, 1929 bp; single-stranded, linear
  immediate source library: COLNTUT06
  immediate source clone: 1610609
atcacagtcaccctggctttggttgttggctttctggtgtggatatcaacactcagcagagctttgaagccttgtcggagagagctgtggcagtggttgtggatcccattcagagtgtaaaaggaaaggttgttattgatgccttcagattgatcaatgctaatatgatggtcttaggacatgaaccaagacaaacaacttcgaatctgggtcacttaaacaagccatctatccaggcattaattcatggactaaacagacattattactccattactattaactatcggaaaaatgaactggaacagaagatgttgctaaatttgcataagaagagttggatggaaggtttgacacttcaggactacagtgaacattgtaaacacaatgaatcagtggtaaaagagatgttggaattagccaagaattacaataaggctgtagaagaagaagataagatgacacctgaacagctggcaataaagaatgttggcaagcaggccccaaaccgtcatttggaggaacatgtggatgtacttatgacctcaaatattgtcccagtgtttagcagctatgttggatactgtcgtattttaaaataaagcaacgaaaaacgctattaatgatgccttcagtgtatattcctctgttgttcctaatgctcaaaatcaagggacctctgaaggtgtacttggctaaatgtaagacatctggcatcatttgcagcactgtaacaccttcagtctcagttgtgcaattacttctgtttctttagtcagggtctttgcagattctaaaattatacatgaatacatcaaagtggacaaattttgttaagatcccatttaatatttgaaaaaatcagtagcacaaatatattttgattgtcacttacaaaataaaatacatttacagtctggaagtgcttcgcggcggaggcccgggcaactcttttgaatggaatcgggctgattcatcgccggtttgcagactgagccgcgtcgggtgtgcgccgctgctgctgttgcctctgtcttcgcgtcaccacagaggcaagacaagggtccatatcgcggaatccggctcccgcccgtcttcaggagagaaagaaaaaataaaatatacttggggaagttgtacctgccagaattagcaagagctttctttaagaagacatttgtcaaactcaacaaattgaaggttaacaccttaagagttgtagttactgaccagaaatatggacagacttcttagacttggaggaggtatgcctggactgggccaggggccacctacagatgctcctgcagtggacacagcagaacaagtctatatctcttccctggcactgttaaaaatgttaaaacatggccgtgctggagttccaatggaagttatgggtttgatgcttggagaatttgttgatgattataccgtcagagtgattgatgtgtttgctatgccacagtcaggaacaggtgtcagtgtggaggcagttgatccagtgttccaagctaaaatgttggatatgttgaagcagacaggaaggccggagatggttgttggttggtatcacagtcaccctggctttggttgttggctttctggtgtggatatcaacactcagcagagcttttgaagccttgtccgnagagagctgtngcagtgggtngtgggtnccatttcagnaggtgtaaaaagggaaaggtngtttattgaatgccttcaagnttgnncaatgctaatatnaatggcttaggccatgacccatgcaacnaacttnnnatcttgggcacttaacaagcatctttccagggattatcatggctaacagcannntcctcnttccttttncttncggaaattncctggcnaanggtgttcnnaaatttcccttaggangggttngtgnnggtttncccctcctgc

SEQ ID NO: 424 - DNA, 1543 bp; single-stranded, linear
  immediate source library: COLNTUT06
  immediate source clone: 1610701
ggcggctggctggccgacgtgtacctgggccgctaccgcgcggtcgcgctcagcctgctgctctacctggccgcctcgggcctgctgcccgccaccgccttccccgacggccgcagctccttctgcggagagatgcccgcntcgccgctgggacctgcctgcccctcggccggctgcccgcnctcctcgcccagcccctactgcgcgcncgtcctctacgcgggcctgctgctactcggcctggncgccagctccgtccggagcaacctcacctccttcggtgccgaccaggtgatggatctcggccgcgacgccacccgccgcttcttcaactggttttactggagcatcaacctgggtgctgtgctgtcgctgctggtggtggcgtttattcagcagaacatcagcttcctgctgggctacagcatccctgtgggctgtgtgggcctggcatttttcatcttcctctttgccaaccccgtcttcatcaccaagcccccgatgggcagccaagtgtcctctatgcttaagctcgctctccaaaactgctgcccccagctgtggcaacgacactcggccagagaccgtcaatgtgcccgcgtgctggccgacgagaggtctccccagccaggggcttccccgcaagaggacatcgccaacttccaggtgctggtgaaggatcttgcccgtcatggtgaccctggtgccctactggatggtctacttccagatgcagtccacctatgtcctgcagggtcttcacctccacatcccaaacattttcccagccaacccggccaacatctctgtggccctgagagcccagggcagcagctacacgatcccggaagcctggctcctcctggccaatgttgtggtggtgctgattctggtccctctgaaggaccgcttgatcgaccctttactgctgcggtgcaagctgcttccctctgctctgcagaagatggcgctggggatgttctttggttttacctccgtcattgtggcaggagtcctgggagatggagcgccttacactacatccaccacaacgaagaccgtgtcccagcagattggggaggtcctgtacaacgcggcaccactgtccatctggtggcagatccctcagtacctgactcattgggatcagtggagatctttgccagcatcccaggcctgggagtttgcctactcagaggccccgcgctccatgcagggcgccatcatgggcatcttcttctgcctgtcgggggtgggctcactgttgggctccagcctagtggcactgctgtccttgcccgggggctggctgcactgccccaaggactttgggaacatcaacaattgccggatggacctctacttcttcctgctggctggcattcaggccgtcacggctctcctatttgtctggatcgctggacgctatgagagggcgtcccagggcccagccttccacagccgttttagcagggacaggggctgaacaggccctattncagcccccttgnttcantntaccggacaganggcagcagttcca

SEQ ID NO: 425 - DNA, 1786 bp; single-stranded, linear
  immediate source library: ADENINB01
  immediate source clone: 161120
tgaaaaaagaactggtttaaaaggaaaaaaaagaaactaaaattctttaaaattgtaatggcagtgaagnattttatagtttctcctccctcattggttctgaattttggtgacaggtgtatttcttaatgcagatatgaaaaacagtagctccgtatcgaatacattgacaaatggatgtgtcatcaatggacatttggacttcccctccacgaccccgctcagtgggatggaaagcaggaatggccagtgcttgacaggaactaacggaattagcagtggattagccccaggacagccgtttccgagtagccagggttctctctgcattagtgggactgaggagccagagaagaccctgagagctaaccctgagttgtgcggttctctgcacctgaacgggagtccaagtagctgcatagccagtaggccttcctgggtggaagacattggggataacctgtactatggacactaccacgggtttggggacactgctgaaagcatcccagaactgaacagtgtggtcgagcattccaagtccgtgaaggtgcaggagcggtacgacagtgccgtgctgggcaccatgcacctgcaccacggctcctagagacgctgacctggctctcggaaacgcaggagtccttcctggtagccagctcagaatacccatgtagcagcaacttgaacgaatgtcacaacttgtactttttttatatacttcaactttctgaaaaagtaaacttcgacaagttcccagcaactgcttgtttgtgcatgagtagggcttactaagtgcatagatgtttctacagtgaggtgtcctttttataaggtgcacttttggagtttttctgatgccaatcttcaacattgtctttttaatactgtcaccagatattgccatttttctttttgttaaaagattatatgatcaagataaattggggtggtaaaatcaggtgcctggtaatttatctctttgcacatgggcatcattttaaaaagcttgcttccactcttttctgtagaatttgacggaacacagctatttccctatgcaaggtacagccttacaaagatttctgcagtgatttgtgtgaagaagagaacgtttgtctttttcaatgaagctttgcagatcaccatgtggttgaaggttttagttgtggacacagtggtccctccttaatgatgaagatcactgccttgggcttcatggaaaacaggcccagcctggggctgcgtttggatttattgtttttattccacacttcctacttggccctctggaagttttaccacatgtaacagattcctttatatgtagtgaaaatcactatttgtagaaactgtcaggtcaaaatatttaactgactgttgacatgtattttcttttttccttgtttttgttttttggggttttctgctttaagatatataccactatgtatatccagttaactgagagaattttgactctcttaataaaactgcattaagtttttgattttgtagaaattagcttttgtctaggcaactagtggttatactctgcaaatattgtaatgaatttttacttttttgatttttgtaataaaaattggtgcagataaaatgtcaaatgaacaaaccagtgttctaagagtgttactaacattttgttctaaaactgtccttcacaaattgaataaaaaactctcacactcaaaaaaananaaaaaananaaanaaaannaaaggatggncgaccggtntngaggagccnnggttnggaangngngaa

SEQ ID NO: 426 - DNA, 638 bp; single-stranded, linear
  immediate source library: ADENINB01
  immediate source clone: 161755
gaatttcccaggaaattttgggttaattgggccaaaaaattttaatcccnccattaataccctggctttccataagggggtatattacctaattaaaaaccggaaatacccataggggtaaattgcattatttgaaaattctcctccattttaccaatgcacttcaccaatggaaacagctaatttccattttgaaaattaaaagaaaacagcacagagaagttaaatgcggtgtagcaaagttatggggtctgcttgagggcactaacctcaacagattattcctcctctccttagaataaccatgaaaatacaaatttacttagcacatttttgctttttaagtagctggttcattttctgaatttctcacattcagagttccagtcattattgttacatcatgtttgcagaaaccttgtcttatttagtgtctatttgcatataaccctgaaaacattattatttgaaaacttttctatatctcaaattaatatacattttcataacctacctttgtattaagacttgcaattttatcaatctattatttcttagaaacaatttactagcttagaatagaaagcaatgttatcgtcatataattttcatgtacaaatgccacaaataaattgaat

SEQ ID NO: 427 - DNA, 1440 bp; single-stranded, linear
  immediate source library: BRAITUT13
  immediate source clone: 1619615
gtcgccgctgtgccgctagcggtgccccgcctgctgcggtggcaccagccaggagggccgggaagttggggaaaggttggggcccggttgagngggncggggggtttaaatttgggggngactaagctggcgtgtgcgccctgagacgctcagcgggctatatactcgtcggtggggccggcggtcagtctgcggcagcggcagcaagacggtgcagtgaaggagagtgggcgtctggcggggtccgcagtttcagcagagccgctgcagccatggccccaatcaagacacacctgccagggtttgtggagcaggctgaggctctgaaggccaagggagtccaggtggtggcctgtctgagtgttaatgatgcctttgtgactggcgagtggggccgagccccacaaggcggaaggcaaggttcggntcctggctgatcccactggggcctttgggganggagacagacttattactagatgattcggcggcccaggcccgccttccgcagggtgtcgccgctgtgccgctagcggtgccccgcctgctgcggtggcaccagccaggaggcggagtggaagtggccgtggggcgggtatgggactagctgggcgtgtgcgccctgagcacgctcagcggtgctatatactcgtcggtggggccggcggtacagtctgcggcagcggcagcaagacggtgcagtgaaggagagtgggcgtctggcggggtccgcagtttcagcagagccgctgcagccatggccccaatcaaggtgggagatgccatgcgaagcagtggaggtgtttgaaggggagccagggaacaaggtgaaacctgggnagagctgttcaagggcaagaagggtgtgctgtttggagttcctggggccttcacccctgggatgttccaagacacacctgccagggtttgtggagcaggctgaggctctgaaggccaagggagtccaggtggtggcctgtctgagtgttaatgatgcctttgtgactggcgagtggggccgagcccacaaggcggaaggcaaggttcggctcctggctgatcccactggggcctttgggaaggagacagacttattactagatgattcgctggtgtccatctttgggaatcgacgtctcaagaggttctccatggtggtacaggatggcatagtgaaggccctgaatgtggaaccagatggcacaggcctcacctgcagcctggcacccaatatcatctcacagctctgaggccctgggccagattacttcctccacccctccctatctcacctgcccagccctgtgctggggccctgcaattggaatgttggccagatttctgcaataaacacttgtggtttgcggccaaaaaanaaanannanaatanaanaaaaantgntaanannannnnagnananntnagnaaaggttgggggg

SEQ ID NO: 428 - DNA, 443 bp; single-stranded, linear
  immediate source library: ADENINB01
  immediate source clone: 162249
tntcnggggccccttttttttttgnggngaaancccccctaaagnccaaaaacncccccgggnnccgagccgnggatntcccaaacccanaaantttanccccccnntaggnnaatncnacgggnnatcctttggcgggaattnaggntggggaaactccaagggtctaaaanttnttccctntttttttttnaagnaaatggangttttttnacccatngttttccncngangacttggntcccttgaaatttcccaaaacnttaaagnnanattaaatccttnncnttaaaccnttcccnaangttncttgaggatttccagggtnttgagcccatnagggcttcagcccccnttanagatttgaaacactttaaatggcccatggtagggttcctgctaggataaaacattaagcggctgttaaaagaaataaaaggang

SEQ ID NO: 429 - DNA, 1868 bp; single-stranded, linear
  immediate source library: HEARFET01
  immediate source clone: 1645339
agactcagatttctgaaaggattcatctaattgatgagtttaataccgatatggatatctttgtgtttctgctatcaacaaaagctggtggattaggaataaatctgacttcagcaaatgttgttatacttcacgatattgactgtaatccttataatgacaaacaagcagaagatagatgccatagagtaggccagactaaagaagtactagttataaaactaataagccaagggacgattgaagaatccatgctaaaaattaaccaacagaaattgaaactagaacaggatatgactacagtagatgaaggtgatgaagggagtatgccagcagatatagccacattactaaaaacatcaatgggcctgtgaaataagaactgtgaactctcaattgatgaggaaatatcaacttggtgcactcaaggacatttacattatgatgaccatggggtttatgaacatttataactttttataatttccatattacatttctcatagtatggacaactttttgccactaactgaattctccaaatactcacacgtgaaatttcaaaaaagaagccacaaatatgtagttctgaagatgttgaataatcattttacaaagcagttttctgaatggggattagttggtgattgtttgtaacaaatatgctaatgctttagaaatgtcagtatttttgtaattatttctacctccaaatatatatatattgtctttcactggataatgtgtgtagatttttacatgtgccttatttgacaatgcttatgtcttgtttttgcttgtctcatttgaagttcttttttattatgttaaagaatgcagctgtatagattatatagctttcattttattgctatttgaagcagatgttcaccaatgtcagcaagaactcaacctgaatttaaaggtggcattccatatactaacatcccccaggtcctctcaagtacttctgctgaaacaaatttatttggctaggcactaagttgttttccagtgaatagtaactaaagaagcccctaccttgctccatggattaattccttctgttcattttccaactgcactaattgtgcatattactctgcctaatcttgtgcatgttttcattgatttccctctcccggcttttgcttctcttgaaactgttgcccagtcacttctgctccaattctcttcctctctaaatagtagtttattactgccacatctccatgcatcagcaaaatgttggtgacatttttctagcctggcagaacagattacttaaagctatttcacttcaaagcagactgaatgtgacttcatctaaaggcagcattaggtactgcatggaaataggtcattaacttgaaactgttatcaaaatatattttaccagtttccagaatttccagtacaggaccgcctgaagagagagccattgttcaattccaattcagtgtgagtgacaaagtgaaatttagaagtgaagttgtctatttgatatttaactctttattaaatctttctttaaatttctgcctgtcagtctatattgctgtttttattatacatcagtttctttgtataacttgtgagttccatgtgttttgtttttattatgtaaatatcattataaataaacttatttataaatcaaagatttgttaatttttggaaatcatgcttttcaaagcatcctaacttgctaagatgctaggtagtacgaccctctggatttggaaggcaaataaaactcttacagtgattatttagatattaaagactgagaactcacggcttaaccncagtcttgatggtatattgaacagactgaatatattttncnattacagggctaaaaggag

SEQ ID NO: 430 - DNA, 1812 bp; single-stranded, linear
  immediate source library: URETTUT01
  immediate source clone: 1658706
gtggcaggcaggcaggctggccccggggacttctctctggccctgctccctccgagcgctccgccgttgcccgcctggcccctacggagtccttagccaggatggaggctgttgtgaacttgtaccaagaggtgatgaagcacgcagttcctgatgtcgggctggctgagcacctatacctggcgctgtgaccctgtggactattccaacagccctgaggcacttaggatggttcgggtggcctggctcttcctcttctccaagttcattgagctgatggacactacctaactttgccaggcaccttttcccttccatccatcttaaaggaaggaagggacgggctgagttccccgacgagagacacanccagattttcctgcagcttggggagaggtcctcccaggagccttggtccctcctggcctgccggagtccttagccaggatggaggctgttgtgaacttgtaccaagaggtgatgaagcacgcagatccccgggatccagggctaccctctgatggggtcccccttgctaatgacctccattctcctgacctacgtgtacttcgttctctcacttgggcctcgcatcatggctaatcggaagcccttccagctccgtggcttcatgattgtctacaacttctcactggtggcactctccctctacattgtctatgagttcctgatgtcgggctggctgagcacctatacctggcgctgtgaccctgtggactattccaacagccctgaggcacttaggatggttcgggtggcctggctcttcctcttctccaagttcattgagctgatggacacagtgatctttattctccgaaagaaagacgggcaggtgaccttcctacatgtcttccatcactctgtgcttccctggagctggtggtggggggtaaagattgccccgggaggaatgggctctttccatgccatgataaactcttccgtgcatgtcataatgtacctgtactacggattatctgcctttggccctgtggcacaaccctacctttggtggaaaaagcacatgacagccattcagctgatccagtttgtcctggtctcactgcacatctcccagtactactttatgtccagctgtaactaccagtacccagtcattattcacctcatctggatgtatggcaccatcttcttcatgctgttctccaacttctggtatcactcttataccaagggcaagcggctgccccgtgcacttcagcaaaatggagctccaggtattgccaaggtcaaggccaactgagaagcatggcctagataggcgcccacctaagtgcctcaggactgcaccttagggcagtgtccgtcagtgccctctccacctaacacctgtgaccaaggcttatgtggtcaggactgagcaggggactgggcccttcccctccccacagctgctctacagggaccacggctttggttcctcacccactttcccccgggtcagctccagggatgtggcctcattgctgtctgccactccagagctgggggctaaaagggctgtacagttatttccccctccctgaccttaaaacttgggagaggagcactcagggctggccccacaaagggtctcgtggcctttttcctcacacagaagaggtcagcaataatgtcactgtggacccagtctcactcctccaccccacacactgaagcagtagcttctgggccaaaggtcagggtgggcgggggcctgggaatacagcctgtggaggctgcttactcaacttgtgtcttaattaaaagtgacagaggaaaccaatt

SEQ ID NO: 431 - DNA, 223 bp; single-stranded, linear
  immediate source library: BMARNOT03
  immediate source clone: 1667573
ctgccttcccaggcagggtggtgctggaggtggctgcagagagccacttgtcccacgtcaccatttcatctcattgtaggctcacctggcacagtggccaagcaggaaggggccaccagtgcatagcccatgctgaagattcagacaggaacctctttccctgttcccagagaatgcggctgagaatgagaacgctgaagatgatccagtccactgaggatgg

SEQ ID NO: 432 - DNA, 379 bp; single-stranded, linear
  immediate source library: BMARNOT03
  immediate source clone: 1668184
agcgacgaactcagtcaccccgccagacccccctccgaacccaaatccggcgcattccccaggaagctctggcaacccgaggccggtgaggctaccccgaggtccccgcagcctgagttgagtacctttcccaagaagcctgcgcanctggagttcaacgtgtaccccaaaaagcctccgcagcctcaggtcggtggcctccctaagaagtccgtgccgcagcctgagttcagcgaggccgctcagactcccctctggaagcctcagtccagcgagccgaagcgcgactccagcgcctttcccaaaaaggcctcccagcctccgctgagtgactttcccaagaagcctccgcagcctgagcttggggacctcaccagga

SEQ ID NO: 433 - DNA, 242 bp; single-stranded, linear
  immediate source library: BMARNOT03
  immediate source clone: 1668715
gagaaaaattacataaaacttaatggggctttgtggtcaccataatggaggaatagcttgcttgttggcatcaggaaacagatgtaaagaatcactaataatttttgtttctttacattatacaaagacatatccttggtattctaaacaatatcaagactgccttatcttaaagctgcttgatcatctgctaaagttttctaaaatatttactgaaataaagtgctgcatgccgactctcc

SEQ ID NO: 434 - DNA, 1667 bp; single-stranded, linear
  immediate source library: BMARNOT03
  immediate source clone: 1669352
cggctcgaggtgggattttccacttgtggcatcatgttggcactaaaaaaatttcaggttttggaacatttcagattttagagttttggatcggcgatgctcaacctgtacatccaaaatattattgcaacatgtaaacaatataagaaattacatgagccactgcgcctggccggacaataatgttttgagctgttgctgagtctggcttttgtgacgggaacttttagcactcaaggagtggccttgtctctggcctgtcccccagtgctcatgggcagccaaggcctggggactgctcaggcagggtagatgtatttgccaggccagctcccgtccctgggacctcagggagtagcttcatccctgaaggctgagtgtcttctgcctcatgtgggtggcccctctgcagggttctcaggcatccagggaagtgggtgccacagcgttgcctccagcctcactggggctggctggactttgctctgacaacacagcagtggctgggcccctgcaactctccagggctcagtttccctgttggccgcactatggcataggcccctgtgtggacaccgatgagctgaccccacaaatgccacccggccgctcccccaggcttcagtggcctaacagctgttgtgtcaggaaccagcttaaagaatctttcttgctttctcaaactctccaggaattcctggtgactggaagggggagtgactcaggccctcaacctctagcaggtaagggtgctacctcctgggtgggcatgcccagttcctcagtgggcccagcgcggcccagcctccgaggaagctctgagcagctggcttggctccgaggtatttttagctacagatccagcccccctccatcaccacaacagtcgagtccaaatcaaacgcgctccaggcaggtggggctggggttctgccagcctcctggccagcaggggtgggtgggcagactggggccagtatcagctgttctgcctggacccaggccgggctgggaaggcacacttgtgcttatttcccgcctccacttctgtgcaagcttgtgctgtcataagcagagatcacagccccatttcttggatggagaaagtggacactgaggtctgaggcttttgaggacagtcaggagccctcctatgggctccagtgatgcactcaccagcttctggtcctcttcttccacctcttagagtgccttggctccctcctgtcgtcctggggaacctcggccccagccctgcctccccagccagtcacagctcctccctaggtcaccctggagggagctcagggcccggctggtagctgggttgctctgcttctgtccccgactcctgtggagcctggcaggcaacttcatgatctgaccccggttaccttgacagccctgcctggcctcccctctcatggcccagccaccccagaacctgaagaggttttctagctgccgtgcatttgccaggctgggttacccaccctactttccctgcctgccctccagtgctgccaggcctagtgtgccagccagcgctcagccttcagtaaagggttcccctgcttccaacctccattgcactgcttcccctaagactgtgacctcctggaaggctggagcacaactgcctctcaataaacgtgttgcaaaaaagg

SEQ ID NO: 435 - DNA, 256 bp; single-stranded, linear
  immediate source library: BMARNOR02
  immediate source clone: 169278
aaaaaagtgagggcttcagaaatagactgatgaagngtggagtctctgaatcttggttctgttgtacttcaggtcaagttatttaaagtctccaaaaataccatgggtagccttagattctacatatataaantgtgggaaanaaaattccttttgatgttnnttngatcnntannttgnnntnaattntttnttttttgttncnggttttggnntgtngatgaatctttgntttttgttttttattttnttttgt

SEQ ID NO: 436 - DNA, 198 bp; single-stranded, linear
  immediate source library: BMARNOR02
  immediate source clone: 169300
ttgtatgtatgttttatacagacgtgtacacacacctatggcatttcctacagaaagtcttttctgattttccagttacttactccctcttctttgtacttaagtgttttgttttgctttctttgtaattcatttagagtagctatcacattatagggtaaataagtcttcctcacgatacctgtgaagtgctcccat

SEQ ID NO: 437 - DNA, 248 bp; single-stranded, linear
  immediate source library: BMARNOR02
  immediate source clone: 169570
atagacataaatatataacaatcacttcttggaagaagtataattgtaaataagccatgtaaaatgcctttttaaaatttaattttctagctggctccaattcaaattgaggatttatgtattaggccacttacttggttggcaagtgcaggaactcagttaaaatgccagttgaagaatggtcatcntccccggnattgcctgtccacttttgggcggaggngagtgggntattaggggccaatgtc

SEQ ID NO: 438 - DNA, 232 bp; single-stranded, linear
  immediate source library: BMARNOR02
  immediate source clone: 169928
tattccccaccttctaagagacaaagaccaacgagccaccacagccaccagtcccagaacctgccaatgctggggaacggaaaatgagggagttcaactctggccctcacaatccagtggaggagacgaaactcatctgcctctgtccctctgggcacgcctcatgccaggtgcatctttggacaggggccatgctcctgggcttccaaagttggagagagctgccaggcta

SEQ ID NO: 439 - DNA, 207 bp; single-stranded, linear
  immediate source library: BMARNOR02
  immediate source clone: 169959
accaagttccctaaagaagaacttggtagacatgaagcagcagctgctctggtctgaagaccaaactttgagaaccaccaatttatacttgggctgaaaaaaacctgtctgactcttttcagagcaaattttgctgaggtgaggacagagtgggtggagaaatcttgaacccactagggagacaagtggccctctcagaaataggct

SEQ ID NO: 440 - DNA, 298 bp; single-stranded, linear
  immediate source library: BMARNOR02
  immediate source clone: 170890
ctgtttttttcttcactcttccttccttgttcatgggagtttttcttgaggacttcaagcccagcttcggagaatcctggttgtgtcatctcatctcctttctgctctcttctctacctagcctttccaccctcacacctcccggggtctgaaaatggaaagataagggtgtttccctgaaagttgctcttctgtgtggggatgacagattctaaagactcttttctgatccttgccctcattgccatgattaatcagttaagtggcccgaggttttgtaacagcacagtcttaaaat

SEQ ID NO: 441 - DNA, 1548 bp; single-stranded, linear
  immediate source library: UCMCNOT02
  immediate source clone: 1713576
gccctgcagaatccttcctgttacggtccccctccctgaaacatccttcattgcaatatttccaggaaaggaagggggctggctcggaggaagagaggtggggaggtgatcagggttcacagaggagggaactgaatgacatcccaggattacataaactgtcagaggcagccgaagagttcacaagtgtgaagcctggaagccggcgggtgccgctgtgtaggaaagaagctaaagcacttccagagcctgtccggagctcagaggttcggaagacttatcgaccatggagcgcgcgtcctgcttgttgctgctgctgctgccgctggtgcacgtctctgcgaccacgccagaaccttgtgagctggacgatgaagatttccgctgcgtctgcaacttctccgaacctcagcccgactggtccgaagccttccagtgtgtgtctgcagtagaggtggagatccatgccggcggtctcaacctagagccgtttctaaagcgcgtcgatgcggacgccgacccgcggcagtatgctgacacggtcaaggctctccgcgtgcggcggctcacagtgggagccgcacaggttcctggctcagctactggtaggcgccctgcgtgtgctagcgtactcccgcctcaaggaactgacgctcgaggacctaaagataaccggcaccatgcctccgctgcctctggaagccacaggacttgcactttccagcttgcgcctacgcaacgtgtcgtgggcgacagggcgttcttggctcgccgagctgcagcagtggctcaagccaggcctcaaggtactgtagcattgcccaagcacactcgcctgccttttcctgcgaacaggttcgcgccttcccggcccttaccagcctagacctgtctgacaatcctggactgggcgaaacgcggactgatggcggctctctgtccccacaagttcccggccatccagaatctagcgctgcgcaacacaggaatggagacgcccacaggcgtgtgcgccgcactggcggcggccaggtgtgcagccccacagcctagacctcagccacaactcgctgcgcgccaccgtaaaccctagcgctccgagatgcatgtggtccagcgccctgaactccctcaatctgtcgttcgctgggctggaacaggtgcctaaaggactgccagccaagcctcagagtgctcgatctcagctgcaacagactgaacagggcgccgcagcctgacggagctgcccgaggtggataacctgacactggacggggaatcccttcctggtccctgggaactgccctcccccacgagggctcaatgaactccggcgtggtcccagcctgtgcacgttcgaccctgtcggtgggggtgtcgggaaccctggtgctgctccaaggggcccggggctttgcctaagatccaagacagaataatgaatggactcaaactgccttggcttcaggggagtcccgtcaggacgttgaggacttttcgaccaattcaaccctttgccccacctttattaaaatcttaaacaacgaa

SEQ ID NO: 442 - DNA, 233 bp; single-stranded, linear
  immediate source library: UCMCNOT02
  immediate source clone: 1713794
gaagaacccaacaatgtgggagtgctacagcagggaaccatgaaacagaaacagcaagatggaggcagccagacaccaaactgggaactcagacacccagattccctccatggcctcacccctgggcaaaatccaactctgagccatcttcttcctccatctctttcaacccccacaggggctgcctgctcttcacagctgtggaggtgagggtgggcgtgggcgggatgctg

SEQ ID NO: 443 - DNA, 237 bp; single-stranded, linear
  immediate source library: BMARNOR02
  immediate source clone: 171449
atcagttgatcagaaaactgtggctcggactcccctggggcagagaagtcgttcgggatcctctcaagaacttgatgtgaaacccagtgcatcccctcaggaaagaagtgagtcagactcttctccagattctaaagccaagacacgaaccccacttcggcagaggagtcggtctggatcatctccagaggttgacagcaaatctcgactatcccctcggcgcagtaggtctggtta

SEQ ID NO: 444 - DNA, 1234 bp; single-stranded, linear
  immediate source library: UCMCNOT02
  immediate source clone: 1714912
tcagttctcagtccaacaggaggagaaaactttacctttcagatatataaggataattttgtgttctgcggactttcacttacctttgtgatgagtttcacctgacttttcctggctttttccctaggctgacatgacatgtagaggctttcgagaatatcatgaaaggcttcagacctttttgatgtggtttattgaaactgctagctttattgacgtggatgatgaaagatggcactactttctagtatttgagaagtataataaggatggagctacgctctttgcgaccgtaggctacatgacagtctataattactatgtgtacccagacaaaacccggccacgtgtaagtcagatgctgattttgactccatttcaaggtcaaggccatggtgctcaacttcttgaaacagttcatagatactacactgaatttcctacagttcttgatattacggcggaagatccatccaaaagctatgtgaaattacgagactttgtgcttgtgaagctttgtcaagatttgccctgtttttcccgggaaaaattaatgcaaggattcaatgaagatatggcgatagaggcacaacagaagttcaaaataaataagcaacacggctagaagggtttatgaaattcttcgactactggtaacctgacatgagtgatgccgaacaatacagaagctacagactggatattaaaagaagactaattagcccatataagaaaaagcagagagatctttgctaagatgagaaaatgtctcagaccagaagaactgacaaaccagatgaaccaaatagaaataagcatgcaacatgaacagctggaagagagttttcaggaactagtggaagattaccggcgtgttattgaacgacttgctcaagagtaaagattatactgctctgtacaggaagcttgcaaattttctgtacaatgtgctgtgaaaaatctgatgactttaattttaaaatcttgtgacattttgcttatactaaaagttatctatctttagttgaatattttcttttggagagattgtatattttaaaatactgtttagagtttatgagcatatattgcatttaaagaaagataaagcttctgaaatactactgcaattgcttcccttcttaaacagtataataaatgcttagttgtgatatgttaatgtgtgatgatatgattcttaaatacttacaataaacctcattcttaaatactt

SEQ ID NO: 445 - DNA, 704 bp; single-stranded, linear
  immediate source library: UCMCNOT02
  immediate source clone: 1715913
ccaaaaccttacagcaacagataaatcatattatggaccctcctggaaaaaacagagatgtggaagaaactttattccaagtggctcatgatcccgactgtggagatgtggtgcgactagggctttcagcaatcgtgagaccgtctagtataagacagagcacgaaaggcatttttactgctggcctgaagaagtcagtgatttatagttcactaaaactgcacaaaatgtggaaagggtggctgaggaaaacatcctgattttgcttgctttcggctcgagtggggtttaccagagtggttgctccagggagaaaattaaaaggggtggaggcagggaaaggaactctgagtttgttgactaggttatgttggtttgcaagtagtcagctggtagacaaacgaagccagagtgtctggaagtattcattaatgattttactgctcccctgccactgtctgcagtggtcttttccaagactctaagtggactaagcagtttacaggtaacagggccagatattttcaagccatcactcaaaccccagtgctaggcatgtccagagcgaaacctgttaccttgtcggcatgctcaccaaagtgcactgccaggggtgtgcactttacactcatagcacagatcacagtttgtgtctcacagtgaaaaagactgttcatatctttgggccacaccctgaaacacaa

SEQ ID NO: 446 - DNA, 238 bp; single-stranded, linear
  immediate source library: BMARNOR02
  immediate source clone: 171603
caaaaagcatagctattgaaaataaggaacagaagaccggtaaaacaaatgaatcgcaaatttcaaataatataaacatgcagagttactcagtagaaatgcctaccgtgtcttccagtggaggcataattggcactggaatagatgaactgcagaagagggtgccaaaattgatctttaagaaaggaagcagaaagaatacagataaaaactaccttaactttgtgtcaccattacc

SEQ ID NO: 447 - DNA, 212 bp; single-stranded, linear
  immediate source library: UCMCNOT02
  immediate source clone: 1716372
caagtgcccaacagccacctgtggcttacatcggacagtacagctcagacaggtctaggacatataaataaaacaaacagcatagatgcttttacatatttaagctatatttaaatgtttggatttgaatatatgataatgaagaaaaatactttaggttgttaacatagatgaagtgggggtaggaatcatgttaagaaaagcacgtaagg

SEQ ID NO: 448 - DNA, 176 bp; single-stranded, linear
  immediate source library: BMARNOR02
  immediate source clone: 171924
cttctcatggcctgtattttcctgtttctttacatgtctagtaatttttgattagaggccagacattgtaatattaccctttttggtccagatattttcgtactcttgagcttgttaagggatacagttaaatcacttggaaagagtttgacccttttatgtctgtntttctgcta

SEQ ID NO: 449 - DNA, 1707 bp; single-stranded, linear
  immediate source library: BRSTTUT08
  immediate source clone: 1728875
ctcggatcacagtctcttctcactacagtgtcgccgcctctgcctgcgtagccccggccatggctctgtagcctcgacccctttgtgcccccggcccgtctccgcgctcaccacggcctgcgcctctccgctcccaccttctttcttcagccgaggccgccgccgcctctccttgctgcagccatggagtcttccactttcgccttggtgcctgtcttcgcccacctgagcatcctccagagcctcgtgccagctgctggtgcagcctctcctgttgccatcagtgcccagcacctgtgctacagccatgtcactcctggcgaccctggggctggagctggacagggccctgctcccagctagtgggctgggatggctcgtagactatgggaaattnnntgnnanngnnnanncnctggntccctatgttggatactctggacttgctgggccatctactgccgcaacgaggccgggcaggaggaagtggggatgccgcctctgcccccgccacagcagccccctcctccttctccacctcaaccttctcgcctggccccctacccacatcctgccaccacccgaggggaccgcaagcaaaagaagagagaccagaacaagtcggcggctctgaggtaccgccagcggaagcggtgcagagggtgaggccctggagggcgagtgccaggggctggaggcacggaatcgcgagctgaaggaacgggcagagtccgtggagcgcgagatccagtacgtcaaggacctgctcatcgaggtttacaaggcccggagccagaggacccgtagctgctagaagggcaggggtgtggcttctgggggctggtcttcagctctggcgccttcatccccctgcctctaccttcattccaaacccctntcnnnnnnnnnnnnnnnnnnnnnnnnnnnnnnnnnnnnnnnnnnnnnnnnnnnnnnnnnnnnnnnnnnnnnnnnnnnnnnnnnnnnnnnnnnnnnnnnnnnnnnnnnnnnnnnnnnnnnnnnnnnnnnnnnnnnnnnnnccttcttccccaccaaaccacccaactcctctctactcttatccttttatcctctgtctctgcttatcacctctcttgcgtatttctggatctccttccctcctttctcgtccaaatcatgaaatgtttggccttagtcaatgtctatgcccgtcacataacagccgaggcaccgaggcccacagggaagcagctgggagcttggaaacctggtctcttgaatttcaaacctggtttcttacaggtggttgtctggggtgggtggagtggcgacaggatagagctgaaggactatgcaaatgaggaagtaagtcagggcgggctttgagaagggggcccatatcctacaggcaaaaagcaggctaggtgaccttgggacactacgctaagggagggaggctaaaggcagccaggtttgcagtgcgggaagatgagcaggccagtgggaggaggggcagggcagggctgtagttggtgactgggtgttcattttagctctaagaaaaaaaaatcagtgtttcgtgaaggtgttggagaggggctgtgtctgggtgagggatggcggggtactgatttttttgggaggttatgagcaaaaataaaacgaaacatttcctctgaaaaaaaaaangananngtngngnnaaaaaagggcggccgccgantattg

SEQ ID NO: 450 - DNA, 571 bp; single-stranded, linear
  immediate source library: BRSTTUT08
  immediate source clone: 1730829
cattgagttggaagactatgatctgggtgggggcaggataacatggcttctctttacccagtgggtcccttcgatgctgagggtggtgagtatgtcactatgcaagggccctgagactatttgctgtgggctctcctccagcctgcccagggcccacccagatgcctctggggttacccctgtctgcttctggtttttctgttggagatctataggtccttttcctgcctccttcacatttcctccccagcttttgcggccacaacacatcagtgtcatttgggtgttttggcaactcaggggccttcggatgatcttaaacctttgtgttcagccagagcccctgtgccctgagtaggcgttggggttagtatctctcgggtgccctcagagccacctctgcctgtgatcgtctgatgaggctccctcccaacctgatccaaaagccagtctcaggagtttacccctgggatgggggatgcatctgcacctgactttggtgccacgtgccctgnggcaccccagctcactgggagtctcaggagggataacnggntttctgctctttccc

SEQ ID NO: 451 - DNA, 272 bp; single-stranded, linear
  immediate source library: COLNNOT22
  immediate source clone: 1736515
gtttatcttctggagaagatagatacagattggtacagagggaactgtagaaaccagattggcatatttcctgccaactatgtcaaagtgattattgatatcccagaaggnggaaatgggaaaagagaatgtttttcanctcattgtgttaaaggctcaagatgtgttnctcggttttgaatatattggagagcagaaggntgagtttagtttctcagagggagaaattattatnctttaaagngtatgttnatgaggaatgggcccanngg

SEQ ID NO: 452 - DNA, 3833 bp; single-stranded, linear
  immediate source library: BMARNOR02
  immediate source clone: 173727
cacctccaagggaaggcttaggcaatgatcctgtttctaccaacactgcnccttatcncaggaacctgcnctagacctccanagaccatattttctctcnctccatttctanccagacctccaggcctccttctggaatcatagaaccgtagaattggaaggaattttagaggttttctagttggagttgtgtccaacagaattcattaacaccagcctgggcttgtttttcctcctccctctggacttttttcatcttttcctccacctcaaaaaatacttacacacagattcttcttgtacaggcatcaaaaccaactcctctgcccctaaggctgtgtccctgtggtctccagccacccctaccccagtcactcgccccttcctcatctctggaatttggccaggcagtcccagaagactctggagtgacctcctttgcctaaaaagcagacagataggcatgccccaggccctgagtgagcagaggaggactgtagggtgagagggaaagaaaatgaaggtgactttcatggaagtttcatttcttttccccgattgtaccaactgcatgtacttttggcctggctgcaaggagcaatattggtttactctcgtatccttaaaaagttacagaactgtgtcttaagagaattatttatagttactataactgaattgacaaatgtcaacttaactgataaattatatttggtaaaataaagaggacgtttatttaggagtttcatcactatgtgggaggacctacggaaacccatgttgtaaggtccccacatccctaccagcttccacaggccttggccccccatgtggactttgtggggggactgcaccgttttcccccaacatcatccctgaggcaacgtcctgagccgcaggtgacagggactgtaggcctgcatctgggggtaaccccctctgtgatccgtaagcgatacaacttgacctcacaagacgtgggctctggcaccagcaataacagccaagcctgtgcccagttcctggagcagtatttccatgactcagacctggctcagttcatgcgcctcttcggtggcaactttgcacatcaggcatcagtagcccgtgtggttggacaacagggccggggccgggccgggattgaggccagtctagatgtgcagtacctgatgagtgctggtgccaacatctccacctgggtctacagtagccctggccggcatgagggacaggagcccttcctgcagtggctcatgctgctcagtaatgagtcagccctgccacatgtgcatactgtgagctatggagatgatgaggactccctcagcagcgcctacatccagcgggtcaacactgagctcatgaaggctgccgctcggggtctcaccctgctcttcgcctcaggtgacagtggggccgggtgttggtctgtctctggaagacaccagttccgccctaccttccctgcctccagcccctatgtcaccacagtgggaggcacatccttccaggaacctttcctcatcacaaatgaaattgttgactatatcagtggtggtggcttcagcaatgtgttcccacggccttcataccaggaggaagctgtaacgaagttcctgagctctagcccccacctgccaccatccagttacttcaatgccagtggccgtgcctacccagatgtggctgcactttctgatggctactgggtggtcagcaacagagtgcccattccatgggtgtccggaacctcggcctctactccagtgtttggggggatcctatccttgatcaatgagcacaggatccttagtggccgcccccctcttggctttctcaacccaaggctctaccagcagcatggggcaggactctttgatgtaacccgtggctgccatgagtcctgtctggatgaagaggtagagggccagggtttctgctctggtcctggctgggatcctgtaacaggctggggaacacccaacttcccagctttgctgaagactctactcaacccctgaccctttcctatcaggagagatggcttgtcccctgccctgaagctggcagttcagtcccttattctgccctgttggaagccctgctgaaccctcaactattgactgctgcagacagcttatctccctaaccctgaaatgctgtgagcttgactttgactcccaaccctaccatgctccatcatactcaggtctccctactcctgccttagattcctcaataagatgctgtaacttagcattttttgaatgcctctccctccgcatctcatctttctcttttcaatcaggcttttccaaagggttgtatacagactctgtgcactatttcacttgatattcattccccaattcactgcaaggagacctctactgtcaccggtttactctttcctaccctgacatccagaaacaatggcctccagtgcatacttctcaatctttgctttatggcctttccatcatagttgcccactccctctccttacttagcttccaggtcttaacttctctgactactcttgtcttcctctctcatcaaatttctgcttcttcatggaatgctgaccttcattgctccatttgtaggatttttgctcttctcagtttactcattgtcccctggaacaaatcactgacatctacaaccattaccatctcactaaataagactttctatccaataatgattgatacctcaaatgtaagatgcgtgatactcaacatttcatcgtccaccttcccaaccccaaacaattccaatctcgtttcttcttggtaaatgatgctatgctttttccaaccaagccagaaacctgtgtcatcttttcaccccaccttcaatcaacaagtcctcaatcaacaagtcctactgactgcacatcttaaatatatctttatcagtccacaagtccttccaattatatttcccaagtatatctagaacttatccacttatatccccactgctactaccttagtttagggctatattctcttgaaaaaaagtgtccttacttcctgccaatccccaagtcatcttccagagtaaaatgcaaatcccatcaggccacttggatgaaaacccttcaaggattactggatagaattcaggctttcccctccagcccccaatcatagctcacaaaccttccttgctatttgttcttaagtaaaaaatcatttttcctcctccctccccaaaccccaagggaactctcactctttgctcaaagctgttccggtnccccttaccaccccctgatacaactgccaggttaatttccagaatttttgcaagactcagttcagaagtcaccttctttcgtgaatgttttgattccctgaggctactttattttggtatggctgaaaaatcctagattttctaaacaaaaccctgtttgaatcttggttctgatatggactaggagagagactgggtcaagtaagcttatctccctgaggctgtttcctcgtctgttaagtgtgaatatcaatacctgcctttcataatcaccagggaataaagtggaataatgttgataacagtgcttggcacctggaagtaggtggcagatgttaacgcccttcctcccttgcattgcgccccctgtgcctacctctagcattgtaacgaccacatagtattgaaatggccagtttacttgtctgccttcctttccaagaccgttggtgcctagaggactagaatcgtgtcctatttaactttgtgttcccaggtcctagctcaggagttggcaaataagaattaaatgtctgctacaccgacanaacaaanaaaaaaaaact

SEQ ID NO: 453 - DNA, 1681 bp; single-stranded, linear
  immediate source library: HIPONON01
  immediate source clone: 1739540
aaacgctaccttcaggatatttggtcataaaaccagaaattaaagaaagaggattaagcttttttgactgaaagtactaaaagtcagctttactagtgccaaacctttaaattttcaaaagaaaattttctttcaacatttcttgaaggacatggagtggagattggatcatttaacaatataacaaaacttcctgatttgattttacgtatcttctatctacgcccttcctgtgcctgtgactctccccaaattgccctgttgccttgagctcttctgagctaaggcagccttcagtccctatcagcgcctcctttacttcccagagaacttcacagagactctgtccttccatgcaaaggcttcctgaaatagggagactgactgagtagctcattcttgtgacttacagtgccaacatttaaacgcggccgtggaggcgccacgtcccttgcggcggcgggagagaaatcgcttggacttcggggcggcctcggacggccatggcctttaccctgtactcactgctgcaggcagccctgctctgcgtcaacgccatcgcagtgctgcacgaggagcgattcctcaagaacattggctggggaacagaccagggaattggtggatttggagaagagccgggaattaaatcacagctaatgaaccttattcgatctgtaagaaccgtgatgagagtgccatttgataatagtaaactcaattgcaattgttttactttttattattttggatgaatatcagtggagaaaatggagactcagaagaggacatgccagtagaagttattactttggtcattattggaatatttatatcttagctggctgaccttgcacttgtcaaaaatgtaaagctgaaaataaaaccagggtttctatttatctgtttttttttttaatgttgcacttgtagtttcattacaaaagatcagatcatgaaaggcagtaactctccaggactggaatatctgattgctcagtgttaatagtagttcatgctgtggtgagattgttaaaagggtgcaagactgttgcttctctttttttagatatttttctatctctcacttctcagggatgaaattctttttcaaagttttgaagttccttgcaacttagccatgatgtgcagtggttatccctagataaaattaaaaggatttttaaaaagtaattactgcacataaaatgataaataggtaatttggaataattttattttaagctccttggttaattattttgtctattgtctcagctataaattcaaatttatacatactattgagtattaatattctctgatttcagggagaattctgtcagtcacatgatgattatgtttttgtttaacattctttccatgcacttgttattttattaatttgcctgaatgatgagaccagaccagtgtctacagattttcattgtcagaaaaatctataagtctgccctttttacaatgatgatttaaaaaaaacaacagcgtaaatattagcccacaagagcagtcctaaacaatcacaattacactgtactacccaagaagactgtttattgtgaagcatttacctttcaaaaaatcattacatttctatttcttggtggagcagcacattgtggagtgtgnttcttaattcttcattgagtttgtcaatagg

SEQ ID NO: 454 - DNA, 2022 bp; single-stranded, linear
  immediate source library: BMARNOR02
  immediate source clone: 174139
caccaatgatatttttctttgtaatacttgaaatttatttttttattattttggatagccagatgtgctatttatttatttaatatgtataaagggaggccctaaaacaaattaggaaagcctgttaggaggattggggttntcaattggtttaaatttgggttttgggggaggccctcccttaatggtggtngaactttaatngnacctttcttcctggntggtttccctggtggttaatttnggcagaagtgtgacctgagagtcccaccttctcttcaggaacgtagatgttggggtgtgttgccctggggggcttggaacctctgaaggtggggagcggaacacctggcatccttccccagcacttgcattaccgtccctgctcttcccaggtggggacagtggcccaagcaaggcctcactcgcagccacttcttcaagagctgcctgcacactgtcttggagcatctgccttgtgcctggcactctgccggtgccttgggaaggtcggaagagtggactttgtcctggccttcccttcatggcgtctatgacacttttgtggtgatggaaagcatgggacctgtcgtctcagcctgttggtttcttctcattgcctcaaaccctggggtaggtgggacggggggtctcgtgcccagatgaaaccatttggaaactcggcagcagagtttgtccaaatgacccttttcaggatgtctcaaagcttgtgccaaaggtcacttttctttcctgccttctgctgtgagccctgagatcctcctcccagctcaagggacaggtcctgggtgagggtgggagatttagacacctgaaactgggcgtggagagaagagccgttgctgtttgttttttgggaagagcttttaaagaatgcatgtttttttcctggttggaattgagtaggaactgaggctgtgcttcaggtatggtacaatcaagtgggggattttcatgctgaaccattcaagccctccccgcccgttgcacccactttggctggcgtctgctggagaggatgtctctgtccgcattcccgtgcagctccaggctcgcgcagttttctctctccccctggatgttgagtctcatcagaatatgtgggtagggggtggacgtgcacgggtgcatgattgtgcttaacttggttgtatttttcgatttgacatggaaggcctgttgctttgctcttgagaatagtttctcgtgtccccctcgcaggcctcattctttgaacatcgactctgaagtttgatacagataggggcttgatagctgtggtcccctctcccctctgactacctaaaatcaatacctaaatacagaagccttggtctaacacgggacttttagtttgcgaagggcctagatagggagagaggtaacatgaatctggacagggagggagatactatagaaaggagaacactgcctactttgcaagccagtgacctgccttttgaggggacattggacgggggccgggggcgggggttgggtttgagctacagtcatgaacttttggcgtctactgattcctccaactctccaccccacaaaataacggggaccaatatttttaactttgcctatttgtttttgggtgagtttcccccctccttattctgtcctgagaccacgggcaaagctcttcattttgaggagagaagaaaaacttgtttggaaccacaccaatgatatttttctttgtaatacttgaaatttatttttttattattttgatagcagatgtgctatttatttatttaatatgtataaggagcctaaacaatagaaagctgtagagattgggtttcattgttaattggtttgggagcctcctatgtgtgacttatgacttctctgtgttctgtgtatttgtctgaattaatgacctgggatataaagctatgctagctttcaaacaggagatgcctttcagaaatttgtatattttgcagttgccagaccaataaaatacctggttgaaatacaaaaaaa

SEQ ID NO: 455 - DNA, 260 bp; single-stranded, linear
  immediate source library: BMARNOR02
  immediate source clone: 174396
tttttaccggctcgccgttgtggaagccagtacgatgtttaacatcaacgccataggggaagtatcctgcgagatcaccagaatctctttaacgcccgcatctaccagacgtttcgcttcacttaacacttcgccaatcggacggctcaccaggtcgccgcgcatagacggaataatgcagaaggtgcagcggtgattacagccttcagaaattttcagataggcataatgacgcggcgtcagtttcacaccttgttctt

SEQ ID NO: 456 - DNA, 206 bp; single-stranded, linear
  immediate source library: BMARNOR02
  immediate source clone: 174675
caacgagcacctcttcagtccgtggactttcccgctgcacactgccctccgaagtcggggacgcgggctcgtgagatggaagattttcgaggtatagcagaagaatcatttccaagctttctcaccaattcattatttggtaacagtgggattttggaaaatgtcactctttcttcaaatcttggcttgcctgttgctgtttctac

SEQ ID NO: 457 - DNA, 2427 bp; single-stranded, linear
  immediate source library: STOMTUT02
  immediate source clone: 1748866
ctggtttggggaaggctcctggcccccacagccctcttcggagcctgancccggctctcctcactcacctcaacccccaggcggcccctccacagggcccctctcctgcctggacggctctgctggtctccccgtcccctggagaagaacaaggccatgggtcggcccctgctgctgcccctactgcccctgctgctgccgccagcatttctgcagcctagtggctccacaggatctggtccaagctacctttatggggtcactcaaccaaaacacctctcagcctccatgggtggctctgtggaaatccccttctccttctattacccctgggagttagccacagctcccgacgtgagaatatcctggagacggggccacttccacgggcagtccttctacagcacaaggccgccttccattcacaaggattatgtgaaccggctctttctgaactggacagagggtcagaagagcggcttcctcaggatctccaacctgcagaagcaggaccagtctgtgtatttctgccgagttgatctggacacacggagctcagggaggcagcagtggcagtccatcgaggggaccaaactctccatcacccaggctgtcacgaccaccacccagaggcccagcagcatgactaccacctggaggctcagtagcacaaccaccacaaccggcctcagggtcacacagggcaaacgacgctcagactcttggcacataagtctggagactgctgtgggggtggcagtggctgtcactgtgctcggaatcatgattttgggactgatctgcctcctcaggtggaggagaaggaaaggtcagcagcggactaaagccacaaccccagccagggaaccctttcaaaacacagaggagccatatgagaatatcaggaatgaaggacaaaatacagatcccaagctaaatcccaaggatgacggcatcgtctatgcttcccttgccctctccagctccacctcacccagagcacctcccagccaccgtcccctcaagagcccccagaacggagaccctgtacttctgtcttaaaggcctaaccaatggacagccctnttcaaggactgaatggtgaggccagggtacagtgngcggnacanctgttaattccccagcttacttctgaaaggcctggaggattcctgatctcaaggggaaagcaagaacaagggaggcttcctcaggatctcaaacctgcggaaggaggaccagtctgtgtacttctgccaagtccagctggacatacagatcagccctcaggcagcccctccacaggacccctctcctgcctggacagctctgctggtctccccgtcccctggagaagaacaaggccatgggtcggcccctgctgctgcccctgctgctcctgctgcagccgccagcatttctgcagcctggtggctccacaggatctggtccaagctacctttatggggtcactcaaccaaaacacctctcagcctccatgggtggctctgtggaaatccccttctccttctattacccctgggagttagccatagttcccaacgtgagaatatcctggagacggggccacttccacgggcagtccttctacagcacaaggccgccttccattcacaaggattatgtgaaccggctctttctgaactggacagagggtcaggagagcggcttcctcaggatctcaaacctgacggaaggaggaccagtctgtgtatttctgccgagtcgagctggacacccggagatcagggaggcagcagttgcagtccatcaaggggaccaaactcaccatcacccaggctgtcacaaccaccaccacctggaggcccagcagcacaaccaccatagccggcctcagggtcacagaaagcaaagggcactcagaatcatggcacctaagtctggacactgccatcagggttgcattggctgtcgctgtgctcaaaactgtcattttgggactgctgtgcctcctcctcctgtggtggaggagaaggaaaggtagcagggcgccaagcagtgacttctgaccaaacagagtgtggggagaagggatgtgtattagccccggaggacgtgattgtgagacccgcttgtgagtcctccacactcgttccccattggcaagatacatggagagcaccctgaggacctttaaaaggcaaagccgcaaggcagaaaggaggctgggtccctgaatcaccgactggaggagagttacctacaagagccttcatccaggagcatccacactgccaatgatataggaataaggtctgaactccactgaattaaaccactggcatttgggggctgtttattatagcagtgcaaagagttcctttatcctccccaaggatggaaaaatacaatttattttgcttaccatacaccccttttctcctc

SEQ ID NO: 458 - DNA, 1567 bp; single-stranded, linear
  immediate source library: STOMTUT02
  immediate source clone: 1749560
gaccgcgggcactgccgccgctaggtagagtctgagggcttgtagttctttaaactgtcgtgtcatactcgagtctgaggccgttgctgacttagaatccctgtgttaatttaagttttgacaagctggcttacactggcaatggtagtttctgtggttggctgggaaatcgagtgccgcatctcacagctatgcaaaaagctagtcaacagtaccctggttgtgtgtccccttgcagccgacacggtctcggatcaggctcccaggagcctgcccagccccctggtctttgagctcccacttctgccagatgtcctaatggtgatgcagtcttagatcatagttttatttatatttattgactcttgagttgtttttgtatattggttttatgatgacgtacaagtagttctgtatttgaaagtgcctttgcagctcagaaccacagcaacgatcacaaatgactttattatttattttttttaattgtatttttgttgttgggggaggggagactttgatgtcagcagttgctggtaaaatgaagaatttaaagaaaaaaatgtcaaaagtagaactttgtatagttatgtaaataattcttttttattaatcactgtgtatatttgatttattaacttaataatcaagagccttaaaacatcattcctttttatttatatgtatgtgtttagggttggaaggtttttgatagcattgtaagcgtatggctttatttttttgaactcttctcattacttgttgcctataagccaaaattaaggtgtttgaaaatagtttattttaaaacaataggatgggcttctgtgcccagaatactgatggaattttttttgtacgacgtcagatgtttaaaacaccttctatagcatcacttaaaacacgttttaaggactgactgaggcagtttgaggattagtttagaacaggtttttttgtttgtttcgatttttgtttttctgctttagacttgaaaagagacaggcaggtgatctgctgcagagcagtaaggggaacaagttgagctatgacttaacatagccaaaatgtgagtggttgaatatgattaaaaatatcaaattaattgtgtgaacttggaagcacaccaatcttactttgtaaattctgatttcttttcaccattcgtacataatactgaaccacttgtagatttgattttttttttttaatctactgcatttagggagtattctaataagctagttgaatacttgaaccataaaatgtccagtaagatcactgtttagatttgccatagagtacactgcctgccttaagtgaggaaatcaaagtgctattacgaagttcaagatcaaaaaggcttataaaacagagtaatcttgttggttcaccattgagaccgtgaagatactttgtattgtcctattagtgttatatgaacatacaaatgcatctttgatgtgttgttcttggcaataaattttgaaaagtaatatttattaaatttttttgtatgaaaacatggaacagtgtggcctcttctgagcttacgtagttctaccgg

SEQ ID NO: 459 - DNA, 341 bp; single-stranded, linear
  immediate source library: STOMTUT02
  immediate source clone: 1749882
aacctggatgcttcgggccccgcacgtgaccttgtcgatgccttcctgctgaagatggcacaggaggaacaaaacccaggcacagaattcaccaacaagaacatgctgatgacagtcatttatttgctgtttgctgggacgatgacggtcagcaccacggtcggctataccctcctgctcctgatgaaataccctcatgtccaaaagtgggtacgtgaggagctgaatcgggagctgggggctggccaggcaccaagcctaggggaccgtacccgcntcccttacaccgacgcggttctgcntgaggcgcacggctgctggcgctggtgcccatgggaata

SEQ ID NO: 460 - DNA, 455 bp; single-stranded, linear
  immediate source library: U937NOT01
  immediate source clone: 1750
atggtaaccgcagctgaggccataacggcacccttnttcatcagcgggatgagagatgattacttctgggaccacagccattccagcagcctgtgtttccccatgccaccctttcctcctccgtccttgccccttccactcatgcttcttccacctatgccacccgctggccaggctgaatttggcccattcccttttgttatcgtgccttctttcacattccccaatgtctaagggatagcctctgtgccactttttgccagagtgtctttgagccagattcatattttgcatagcaccccatcaaaagtagttcatcaaatgtctattaaaacgttttaaagaaaagtacatcattgncccattttttagggcacttgtaaaaatgtttcctatnaatatgcngaagggnattgtacaanttgttttgtgtggcacatgggggcaagtaagag

SEQ ID NO: 461 - DNA, 544 bp; single-stranded, linear
  immediate source library: TLYMNOT01
  immediate source clone: 176361
gcacattgggcatcagccacacacctgggctctggcctaagctctgggatacaaggcgatggatgaggtataccatgccccctagtaatgagctaagtgttagttgctatgttgcagagcagggtcacattaactaatattttaagcagtaacgatacagtgctttgggcgttgacataaggaagagatggactgggagttgttttttgtttttaagagggaagaatttaaaaaagttagtggatagtagactttcaaaaatgtttgtccattagaatggagttgtatgtatccagagggtaatattcccataggcataaaatgttaagaagactgactcatacctggaatttggaaaggtagccttcccagatattttgggaacttctttgttnnnnnnnnnnnnnnnnnntgcccaatatgacagcacattgggcatcaggcatatggctgatcctggggccgcaggggaccatgaaaagacacaggatttgggttcaatcatgagagaaagggaatcctttccctagcttcttacacagag

SEQ ID NO: 462 - DNA, 618 bp; single-stranded, linear
  immediate source library: TLYMNOT01
  immediate source clone: 176898
ggctggcagcccctcgcccaccagcgcctcccctcaccgactttggcctttttagcaacagacacaaggaccaggctccggcggcagcgggggtcacatacgggttccctcaccctgccagccgcccgcccgcccggcgcagatgcacgcggctcgtgtatgtacatagacgttacggcagccgaggtttttaatgagattctttctatgggctttacccctcccccggaacctccttttttacttccaatgctagctgtgacccctgtacatgtctctttattcacttggttatgatttgtattttttgttcttttcttgtttttttgtttttaatttataacagtcccactcacctctatttattcatttttgggaaaacccgacctcccacagccccaagccatcctgcccgcccctccagggaccgcccgtcgccgggctctccccgcgccccagtgtgtgtccgggcccggcccgaccgtctccacccgtccgcccgcggctccagccgggttctcatggtgctcaaacccgctcccctcccctacgtcctgcactttctcggaccagttcccccacttccgacccgaccccagncccacctgagggtgagca

SEQ ID NO: 463 - DNA, 761 bp; single-stranded, linear
  immediate source library: TLYMNOT01
  immediate source clone: 177044
cgtcgaggtccggggcgcctcaactctatagctctaactggctagaagtgcccaacgtggaatgtttcttttttaaaggcggctcttgaagcgacccggaagcggaagtggaagaaagttctagtggcttgaggtatccgcaggagcggccgggtggcgggaggaaccgttacgggaactgaagttgcggattaagcctgatcaagatgacaacctcccaaaaagcaccgaggacttcgtggcagagcccatggggggagaagccagtggggagcctggctgggattggtgaagtcctgggcaagaagctggaggaaaggggttttgacaaggcctatgttgtccttggcccagtttctggtgctaaagaaagatgaagacctcttccgggaatggctgaaagacacttgtggcgccaacgccaagcagtcccgggactgcttcggatgccttcgagagtggtgcgacgcttcttgtgatgctctctgggaagctntaaatcccnagccctcatccagagtttgcaagccgagtagggacttctcccctgtcctctacggggaaaagnttgctattgtcgtanttaacttcgacgnacttcggggtcttttgggagttttttccctaaccattcaacttttttttggnttctcggtcttgcanggctnccccgnnctttttcccttgncanattcctggggacanttanccaggtttcctnaatgggattccgggcccatnccttaacccnaaccttaatt

SEQ ID NO: 464 - DNA, 1520 bp; single-stranded, linear
  immediate source library: MENTUNON3
  immediate source clone: 1772802
aaagaaagaagctcacagaacctctacttctgccttgtctccaggatccaagcccagcacttgggtgtcttgcccaggggaggaagagaatcaagccacggaggataaaagaacagaaagaagtaaaggagccaggaagacctccgtgtccccccgatcttcaggctccgaccccaggtcctgggagtatcgttcaggagaggcgtccgaggagaaggaggaaaaggcacacgaagaaactgggaaaggagaagctgccccagggccgcaatcctcagccccagcccagaggccccagctcaagtcctggtggtgccaacccagtgatgaagaggagagtgaggtcaagcctttgggggcagctgagaaggatggagaagctgagtgtcctccctgcatccccccaccaagtgccttcctgaaggcctgggtgtattggccaggagaggacacagaggaagaggaagatgaggaagaagatgaggacagtgactctggatcagatgaggaagagggagaagctgaggcttcctcttccactcctgctacaggtgtcttcttgaagtcctgggtctatcagccaggagaggacacagangaggaggaagatgaggacagtgaatacaggatcagccgaggatgaaagagaagctgagacttctgcttccacaccccctgcaagtgcctttcttgaaggcctgggtgtatcggccaggagaggacacggaggaggaggaagnttnggatgtggatagtgaggataaggaagatgattcagaagcagccttaggagaagctgagtcagacccacatccctcccacccggaccagagtgcccacttcaggggctggggatatcgacctggaaaagagacagaggaagaggaagctgctgaggactggggagaagctgagccctgccccttccgagtggccatctatgtacctggagagaagccaccgcctccctggggctcctcctaagcttcccctccgactgcaaaggcggctcaagcgcccagaaacccctaactcatgatccggaccctgagactcccctaaaggccagaaaggtgcgcttctccgagcaaggtcactgtccatttcctggctgtctgggcagggccggcccaggccgcccgccagggcccctgggagcagcttgctcgggatcgcagccgcttcgcacgccggcatcacccaggcccagggaggagctgagcccctgcctcacccctgctgcccgggccagagcctgggcacgcctcaggaacccacctttagcccccatccctgccctcacccagaccttgccttcctcctctgtcccttcgtccccagtccagaccacgcccttgagccaagctgtggctacaccttcccgctcctctgctgctgcagcggctgccctggacctcagtgggaggcgtggctgagaccaactggtttgcctataatttattaactatttattttttctaagtgtgggtttatataaggaataaagccttttgatttgt

SEQ ID NO: 465 - DNA, 188 bp; single-stranded, linear
  immediate source library: TLYMNOT01
  immediate source clone: 177384
ggtttctttctccctaagagtaataattacctgtattttagtttttagctctctttgcattcgaaagtgaggaaagggccttgaatttcaggcagagacaatttcttatctattctgttcccaccccttaaagttacttaagtatggatcccttgtccacatttataaaggagaatcaaatagataac

SEQ ID NO: 466 - DNA, 2061 bp; single-stranded, linear
  immediate source library: TLYMNOT01
  immediate source clone: 177562
tgtgggacttgactgatgcacatattggcacctagaaaacttacacagaaattaaaaataagtgttggcatattttgacctttttttgcctaaggatgaaatttaatttacatgtctgaacttaattaactttctgagattttaaatttccatcacgttgactgcttttttcataggttttaagttgggaattgcaaacttgcaatcaagttacacagactgttaccacaaaatgtttttgtaaactaaattataaaatttatctctggaaagtgtgtagtcatgtgtttctccttaaattacacaggttatggaggttttgatgactatggtggctataataattacggctatgggaatgatggctttgatgacagaatgagagatggaagaggtatgggaggacatggctatggtggagctggtgatgcaagttcaggttttcatggtggtcatttcgtacatatgagagggttgccttttcgtgcaactgaaaatgacattgctaatttcttctcaccactaaatccaatacgagttcatattgatattggagctgatggcagagccacaggagaagcagatgtagagtttgtgacacatgaagatgcagtagctgccatgtctaaagataaaaataacatgcaacatcgatatattgaactcttcttgaattctactcctggaggcggctctggcatgggaggttctggaatgggaggctacggaagagatggaatggataatcagggaggctatggatcagttggaagaatgggaatggggaacaattacagtggaggatatggtactcctgatggtttgggtggttatggccgtggtggtggaggcagtggaggttactatggggcaaggcggcatgagtggaggtggatggcgtgggatgtactgaaagcaaaaacaccaacatacaagtcttgacaacagcatctggtctactagactttcttacagatttaatttcttttgtattttaagaactttataatgaactgaagggaatgtgttttcaaaatattatttggtaaagcaacagattgtgatgggaaaatgttttctgtaggtttatttgttgcatactttgacttaaaaataaatttttatattcaaaccactgatgttgatactttttatatactagttactcctaaagatgtgctgccttcataagatttgggttgatgtattttactattagttctacaagaagtagtgtggtgtaattttagaggataatggttcacctctgcgtaaactgcaagtcttaagcagacatctggaatagagcttgacaaataattagtgtaacttttttctttagttcctcctggacaacactgtaaatataaagcctaaagatgaagtggcttcaggagtataaattcagctaattatttctatattattatttttcaaatgtcatttatcaggcatagctctgaaacattgatgatctaagaggtattgatttctgaatattcataattgtgttacctgggtatgagagtgttggaagctgaattctagccctagattttggagtaaaaccccttcagcacttgaccgaaatacccaaaaatgtctccaaaaaattgatagttgcaggttatcgcaagatgtcttagagtagggttaaggttctcagtgacacaagaattcagtattaagtacataggtatttactatggagtataattctcacaattgtattttcagttttctgcccaatagagtttaaataactgtataaatgatgactttaaaaaaatgtaagcaacaagtcccatgtcatagtcaataaaaacaatcctgcagttgggttttgtatctgatccctgcttggagttttagtttaaagaatctatatgtagcaaggaaaaggtgctttttaattttaatccctttgatcaatatggcttttttccaaattggctaatggatcaaaatgaaacctgttgatgtgaattcagttattgaacttgttacttgtttttgccagaaatgttatntttttttttaataaatgtcaatgtgggagat

SEQ ID NO: 467 - DNA, 914 bp; single-stranded, linear
  immediate source library: TLYMNOT01
  immediate source clone: 177606
tgagtaacatgaaacttggcagtagcagagagcactgaagttcacatgcaagttctaatctaaagttaagcagtctcttatttgtttcgggactctgatttgactctttttctgatgctttcagcatgtctgcagcctgttctcctagcctgctgcttggagtcaggttgagcatcagtgagatgaagacagtaccttttcctctcacattggcagaatagcacgcactagatgcctgaccttgagctctagtctcccctttaaatcttaccttggcagtaacacattattcctcattcaataatttcaatgctgaaactgaactctattactaatgccttccaatcagagttcctgatggggatgcctgtgggatggcccacacctgggggacctggcagatggggtgagttgggtaaggaagatgatgctttagtttcctggatagatgctacagatgtagtttggcatttcagtttttgtccagtttgattttcactggggtttgagtcacagcaagctgtgtatgaacttgtgttttgtggtgacacattaataatcaaattgctaaaaccctgaatctgcatattctncagcntcacctctgcactaaccccttacccttatggtacgtcaggattttaactagtactgctttgttgactttgggaaatggtgccactcaaaagcaacttcctaacttgaggaataactcctttgtagtttactttctggtactggttggtgccttgtattgggatacagctatattcttagctcaaatgtcctctttttgagagcaaagtagttatccaatggtgagacgagaccctgacgctcatagaggccattccttcctgggtgtcggaccagggccctgtgtcagggaaaccttcctggggggantttgnaaa

SEQ ID NO: 468 - DNA, 568 bp; single-stranded, linear
  immediate source library: TLYMNOT01
  immediate source clone: 177867
gctcgagctcgcgcgagcagtttagtctgaggcgaagtttcggagcggccggtactgttgaaagcgacaagtggaggcgccgctctagcggccgggactctgaactatggcggctagtgatacagagcgagatggactagccccagaaaagacatcaccagatagagataagaaaaaagagcagtcagaagtatctgtttctcctagagcttcaaaacatcattattcaagatcacgatcaaggtcaagagaaagaaaacgaaagtcagataatgaaggaagaaaacacaggagccggagcagaagcaaagagggaagaagacatgaatccaaagataaatcctctaagaaacataagtctgaggaacataatgacaaagaacattcttctgataaaggaagagagcgactaaattcatctgaaaatggtgaggacaggcacaaacgcaaagaaagaaagtcatcaaggaggcagaagtcactcaagatctaggtctcgtgaaagacgccatcgtagtagaagcagggagcggaagaagtctcgatccaggagtagggagcggaagaa

SEQ ID NO: 469 - DNA, 218 bp; single-stranded, linear
  immediate source library: PLACNOB01
  immediate source clone: 178337
tccactgccctgccctgaagcctcccgaaaatggttactttatccaaaacacttgcaacaaccacttcaatgcagcctgtggggtccgatgtcaccctggatttgatcttttgggaagcagcatcatcttatgtctacccaatggtttgtggtccggttcagagagctacttcangagtaagnacangtnctcatctccgccagncgaaaanatgtgc

SEQ ID NO: 470 - DNA, 1988 bp; single-stranded, linear
  immediate source library: PLACNOB01
  immediate source clone: 181611
gacanacggggactntgcaggctcagattcantncctattggcagaacccaccacaggtgtatttntgtcantttggccagtctctaatccatgtcanncaggtggtcatnggctaattnatnatgctnnncctaattttctaaaacaaccgggttttncnnggtgtcgtcttgggctntnctgtgggctaataactaggcttaaccanttcttagcacagttagctggtgaggnacggcggcggttgaactgactcggagcgaggagacccgagcgagcagacgcggccctggcgcccgccctgcgcactcaccatggcgatgcatttcatcttctcagatacagcggtgcttctgtttgatttctggagtgtccacagtcctgctggcatggccctttcggtgttggtgctcctgcttctggctgtactgtatgaaggcatcaaggttggcaaagccaagctgctcaaccaggtactggtgaacctgccaacctccatcagccagcagaccatcgcagagacagacggggactctgcaggctcagattcattccctgttggcagaacccaccacaggtggtatttgtgtcactttggccagtctctaatccatgtcatccaggtggtcatcggctacttcatcatgctggccgtaatgtcctacattttttttgattttccttggtgtggtcttgggctctgctgtgggctactacctagcttacccacttctcagcacagcttagctggtgaggaacgtgcaggcactgaggctggagggacatggagccccctcttccagacactatacttccaactgccctttcttctgatggctattcctccaccttattcccagcccctggaaactttgagctgaagccagcacttgctccctggagttcggaagccattgcagcaaccttccttctcagccagcctacatagggcccaggcatggtcttgtgtcttaagacagctgctgtgaccaaagggagaatggagataacaggggtggcagggttactgagcccatgacaatgcttctctgtgactnaaaccaggaatttccaaagatttcaagccagggagaagggttcttggtgatgcagggcatggaacctggacaccctcagctctcctgctttgtgccttatctacaggagcatcgcccattggacttcctgacctcttctgtctttgagggacagagaccaagctagatcctttttctcacctttctgcctttggaacacatgaagatcatctcgtctatggatcatgttgacaaactaagttttttttatttttcccattgaactcctagttggcaattttgcacattcatacaaaaaaatttttaatgaaatgatttcattgattcatgatggatggcagaaactgctgaggacctatttccctttcttggggagagaataagtgacagctgattaaaggcagagacacaggactgctttcaggctcctggtttattctctgatagactgagctccttccaccagaaggcactgcctgcaggaagaagatgatctgatggccgtgggtgtctgggaagctcttcgtggcctcaatgccctcctttatcctcatctttcttctatgcagaacaaaaagctgcatctaataatgttcaatacttaatattctctatttattacttactgcttactcgtaatgatctagtggggaaacatgattcattcacttaaaatactgattaagccatgggcaggtactgactgaagatgcaatccaaccaaagccattacattttttgagttagatgggactctctggatagttgaacctcttcactttataaaaaaggaaagagagaaaatcactgctgtatactaaatacctcacagattagatgaaaagatggttgtaagctttgggaattaaaaacaaacaaatacattttagtaaatatatatttttaaaaaaaagaanaagaaaaaagta

SEQ ID NO: 471 - DNA, 328 bp; single-stranded, linear
  immediate source library: COLNNOT08
  immediate source clone: 1844277
ggcattctgaaataggattcatgatgatgcctgttgatcttagggacactacctcacctgccagtatctttggggctgtgtccttcaaggacatgtccccagactgctgtgcagtgtcattttttgtgtttggtttggtggtggcttcttcccccttgctaggctatcaacctcttatcaccatttgttggtgtcagaactaactgcttctggtctggagagggactgaccgatgcctttgggtagagagaattatgaaagaaattttggtatttttctactttatattttctgaggtttctgtaataagcatatttcacttttccaa

SEQ ID NO: 472 - DNA, 483 bp; single-stranded, linear
  immediate source library: LUNGFET03
  immediate source clone: 1852619
ggcaagatggtgcactcaaaccatctggttgaacctggggaggttgaacctggggaggagactggctaggcaagggcagaagcccagcagggcaccagaatcccccaccccggggttgtgtgtctccagcccagcaggggccttggaagctccatacctctcactctgtcaccccaatctctggctcttacagatgcgacctaaagtcatgtggcacctccttcgaaggtacatggcatcccggctccattccctgcggatgggtggctacctgttctctggctcccaggccccccagttgtcccctgctctgttgagagccctgggccagaagtgccccaacctgaagcgcctctgcctgcacgtggccgacctgagcatggtgcccatcaccagcctgcccagcaccttgaggaccctggagctgcacagtgcgagatctccatggcctggctccacaagcagcaggaccccaccgtgctg

SEQ ID NO: 473 - DNA, 883 bp; single-stranded, linear
  immediate source library: PROSNOT19
  immediate source clone: 1862092
aaatttcctggtccctccggagaaatccatcaacaaaattggccacgggtctgcacggccacggaccccgtcttcaagagcatcacacactncttcaaggtgcagaccttgggcagaagtctgggcctncanatgcccgtggtggtgcagagcatgtacatctttaagcaacctcactttggcggtgaagtctcccctcatcaggacgcctccttcctgtacacggagcccctgggccgggtgctgggcgtgtggatcgcagtggaggatgccacgctggagaacggctgtctctggttcatccctggctcccacaccagtggtgtgtcaagaaggatggtccgggcccctgttggctcagcgcctggtaccagcttccttgggtcagagccagcccgggataacagcctctttgtgcccaccccagtgcagagaggggccctggtcctcatccatggagaagtggtacacaagagcaagcagaacctctctgaccgctcgcgccaggcctacactttccacctcatggaggcctctggcaccacctggagcccggagaactggctccagccaacagctgaactgccctttccccaactgtacacctaaaggctctcgcaggggcaggagccctcgcccctcccgggtgaagctgtgggctgtaaacaccagtgccttgctcagcctcctggttgcaacagggaggtcttgtctcccctcctgggctttcctcctgccctgtgggcagcagcctaggctgggtcaggggcttccctaagatcttcacctctctgcctccctactgccccaacatagccttgaggaggcttctcagccaccaaagggttctggccccttntnactctcctntcctttaagatgg

SEQ ID NO: 474 - DNA, 256 bp; single-stranded, linear
  immediate source library: LEUKNOT02
  immediate source clone: 1873202
attctacaacaaacccaccctctcagccctgcccagtcctgtggtgacctcaggagagaacgtgaccctccagtgtggctcacggctgagattcgacaggttcattctgactgaggaaggagaccacaagctctcctggaccttggactcacagctgacccccagtgggcagttccaggccctgttccctgtgggccctgtgacccccagccacaggtggatgctccagatgctatggctctcgcaggcatatcct

SEQ ID NO: 475 - DNA, 954 bp; single-stranded, linear
  immediate source library: LEUKNOT03
  immediate source clone: 1876702
tcacagcctgcggggctcctgcctcttctgacttcactgggggcccagaggcagatgggtgggtgggtgggcaggtggcctgccaggccaggagtgggctggagctgctgaggcccagaaggcccgcatagttcctcaccaggagggtctccctccagcacaggtcccgcctgctcagtccctgtgctttccaagtggagggggtgtcagctcggtcaccaagagaagtgacttcccaggagcaccagtcccctcacagaggtgctgtgagcgaggcctccttcggtccaggcagaacctcaggcagtctctcctggtcctgcatgtgtgcaactccagctaataataggtattttatatacagatggacagatatttttttaaactggggagttttcctgatcttgggtcctctttagggggccagacaagaaaggcctacggtttctggagcaaacctgtcccccacctgtgaccagtcactctggggcaagcatcactgggaagggcatagccggagaccttttctcctaatgactggtagtcagtggggcattttaggatgtcagggccccagggtgacatgtgtccagcttttctatggcagcagaggcctttccctcagacaagctacaaagtgcccaggatgcccatccacccatggtccccttcagtacctcacgcatggtccccagcttctcctaggatcccagtggcatttatcagtggccagctacctgccaggcccgggctggggcacggtctgcggccatgaggccaggccgcctcctgcacccctaccccgtggcagcagcatacctctgcatttctggaatgtgtgtgcatcaatgatgtttgtatatttgaggcatttaaaaatctattttcgttacgagggcaaatgaagaatgaatattgatcttaaaaaaagaaaagaagacaaaaaaaataccc

SEQ ID NO: 476 - DNA, 280 bp; single-stranded, linear
  immediate source library: LEUKNOT03
  immediate source clone: 1878710
ctccttttcagtgcttaggttgagcttgcatacttgatgttttcaggaccctacccaagattgggaacacaaatgtggctgagtcctggaccttgggtaactcacaatttggtgtttctatggaggtgatgtttgagatgagatgtgctagacacagtgggggctggggagacactgtcaggtaaacagcaccacaagagagcatggtgtattccagggccagcgtgactggagcaaggaggagttgcagggagcaaaagtctaaagagctcagcagagg

SEQ ID NO: 477 - DNA, 283 bp; single-stranded, linear
  immediate source library: LEUKNOT03
  immediate source clone: 1878722
ccacagacagctttgtctttttatatgaacgtctctgtgcaccagaaaaaaaagagaaaacgtgtttcctctaagagagacagaacaggcacctttggtgaaggtaactgaatgaactgtttggggtgcggtggagaagaaacagttgcttgggagctggggcagcccccgtcccgctcagctgtggggctgcagggagaggctcggtcctggtgcatgtggcacacacggcgaggccccggggcgacgtggccaggccgtgctgcagcagccccagccctcc

SEQ ID NO: 478 - DNA, 1874 bp; single-stranded, linear
  immediate source library: LEUKNOT03
  immediate source clone: 1878957
tgaggtgacttccaagctgaagagctatgaattccggggaagccctttccaggtgacccggggggactacgcgcccatcctccagaaggtggtggagcagctggagaaagccaaggcctatgcagccaacagccaccaggggcagatgctggcccagtatatagagagcttcacccagggctccatcgaggcccacaagaggggctcccgcttctggatccaggacaaaggccccatcgtggagagttacatcgggttcatcgagagctaccgcgacccctttggttcccgaggagaatttgaaggtttcgtagctgtggtgaacaaggccatgagtgccaagtttgagcggctggtggcgagcgcagagcagctgctgaaggagctgccctggtcccccaacctttgaagaaaggacaagttcctcacccctgacttcacctccctgggatgttctcaccttcgctggctccggcatccctgccggcatcaacatccccaactacgaatgatctgaggcagacggaaggctttaagaacgtgtcgctggggaatgtgctggctgtggcctacgccacgcagcgggagaagcttacctttctggaggaggatgacaaggacctgtacatcctctggaaggggccctccttcgatgtgcaggtgggcctgcacgagctgctgggccatggcagtggcaagctcttcgtacaggacgaaaaaggagcattcaactttgaccaggaaacagtgatcaacccagagacgggcgagcagattcagagctggtatcggagcggggagacctgggatagcaagttcagcaccatcgcctccagctacgaagagtgccgggctgagagcgtgggtctctacctctgtctccacccgcaagtgctggagatctttggctttgagggggctgatgcggaggacgtgatctacgtgaaactggctcaacatggttcgggccgggctgctcgctctggagttctacacacctgaggccttcaactggcgacaggcccatatgcaggcccggtttgtgatcctgagagtcttgctggaggctggcgagggactcgttaccatcactcccaccacaggctccgatgggcgcccagatgcccgggtccgcctcgaccgcagcaagatccggtctgtgggcaagcctgctctagagcgcttcctgcggagacttcaggtgctgaagtccacaggggatgtggccggagggcgggccctgtacgaggggtatgcaacggtcactgatgcgccccccgagtgcttcctcaccctcagggacacggtgctgctgcgtaaggaatctcggaagctcattgttcagcccaacactcgccttgaaggctcagacgtgcagcttctggaatacgaggcgtcagctgctggcctcatccgatccttctctgagcgtttcccagaggatggacccgagttggaggagatcctcacacagctggccacagccgatgcccgattctggaagggccccagtgaggccccatctggccaagcttgaggaagatgtgtggccttgcccccaattccatcagaccaaggctgcaagtggccctccattcgtgtgtgtatttaggggctggggagggggaggggcaggagcttggaccttggtactacctcagctgagggtggtgacacaaccccttccatttgtcagcactttccagcctgccaattgcttcccctctgtgatctcatttcatctgcactgccatacgtggagtgagcaagacagggcttaccatcctgtctaccagatgaggaaatggcagttctgagaagtcactggtctagatcccgcagtggcacgtgacagctagggttcaaaacgttct

SEQ ID NO: 479 - DNA, 665 bp; single-stranded, linear
  immediate source library: OVARNOT07
  immediate source clone: 1905986
taaaatgttccgggcccagagcaaaggtatttgcagttttgctgtctatagttctatgcacagtaacgctatttcttctacaactaaaattcctcaaacctaaaatcaacagcttttatgcctttgaagtgaaggatgcaaaaggaagaactgtttctctggaaaagtataaaggcaaagtttcactagttgtaaacgtggccagtgactgccaactcacagacagaaattacttagggctgaaggaactgcacaaagagtttggaccatcccacttcagcgtgttggcttttccctgcaatcagtttggagaatcggagccccgcccaagcaaggaagtagaatcttttgcaagaaaaaactacggagtaactttccccatcttccacaagattaagattctaggatctgaaggagaacctgcatttagatttcttgttgattcttcaaagaaggaaccaaggtggaatttttggaagtatcttgtcaaccctgagggtcaagttgtgaagttctggaggccagaggagcccattgaagtcatcaggcctgacatagcagctctggttagacaagtgatcataaaaaagaaagaggatctatgagaatgccattgcgtttctaatagaacagagaaatgtctccatgagggtttggtctcattt

SEQ ID NO: 480 - DNA, 1990 bp; single-stranded, linear
  immediate source library: OVARNOT07
  immediate source clone: 1906277
tcgtaagttttcggcagtttccggggagactcggggactccgcgtctcgntctctgtgttccaatcgcccggtgcggtggtgcagggtctcgggctagtcatggcgtccccgtctcggagactgcagactaaaccagtcattacttgtttcaagagcgttctgctaatctacacttttattttctggatcactggcgttatccttcttgcagttggcatttggggcaaggtgagcctggagaattacttttctcttttaaatgagaaggccaccaatgtccccttcgtgctcattgctactggtaccgtcattattcttttgggcacctttggttgttttgctacctgccgagcttctgcatggatgctaaaactgtatgcaatgtttctgactctcgtttttttggtcgaactggtcgctgccatcgtaggatttgttttcagacatgagattaagaacagctttaagaataattatgagaaggctttgaagcagtataactctacaggagattatagaagccatgcagtagacaagatccaaaatacgttgcattgttgtggtgtcaccgattatagagattggacagatactaattattactccagaaaaaggatttcctaagagttgctgtaaacttgaagattgtactcccacagagagatgcagacaaagtaaacaatgaaggttgttttataaaggtgatgaccattatagagtcagaaatgggagtcgttgcaggaatttcctttggagttgcttgcttccaactgattggaatctttctcgcctactgcctctctcgtgccataacaaataaccagtatgagatagtgtaagctcaatgtatctgtgggcctattcctctctacctttaaggacatttagggtcccccctgtgaattagaaagttgcttggctggagaactgacaacactacttactgatagaccaaaaaactacaccagtaggttgattcaatcaagatgtatgtagacctaaaactacaccaataggctgattcaatcaagatctgtgctcgcagtgggctgattcaatcaagatgtatgtttgctatgttctaagtccaccttctatcccattcatgttagatcgttgaaaccctgtatccctctgaaacactggaagagctagtaaattgtaaatgaagtaatactgtgttcctcttgactgttatttttcttagtagggggcctttggaaggcactgtgaatttgctattttgatgtagtgttacaagatggaaaaattgattcctctgactttgctattgatgtagtgtgatagaaaattcaaccctctgaactggcttcttcccagtcaaggttatctggtttgattgtataatttgcaccaagaagttaaaatgttttatgactctctggttctgnctagacaggcagagagtcacattgtgtaatttaatttcagtcagtcaatagatggcatccctcatcagggttgccagatggtgataacagtgtaaggccttgggtctaaggcatccacgactggaagggactactgatgttctgtgatacatcaggtttcagcacacaacttacatttctttgcctccaaattgaggcatttattatgatgttcatactttccctcttgtttgaaagtttctaattattaaatggtgtcggaattgttgtattttccttaggaattcagtggaacttatcttcattaaatttagctggtaccaggttgatatgacttgtcaatattatggtcaactttaagtcttagttttcgtttgtgcctttgattaataagtataactcttatacaataaatactgctttcctctaaaaagatcgtgtttaaattaacttgtagaaaatctgctggaatggttgttgttttccactgagaaagctaagccctacatttctattcagagtactgtttttagatgtgaaatataagcctgcggccttaactctgtattaaaaaaaa

SEQ ID NO: 481 - DNA, 1434 bp; single-stranded, linear
  immediate source library: CONNTUT01
  immediate source clone: 1908804
gaacctctccctggaaagacgggcagggctggttagcccctcccactgcctgacacctgggacaggctgggcagaggggagagagggcaggacaggccagagtgacgcccccgtgcagcttgggccggagggcaagggatgccagtaagtctgcaggtgcggggtgccacctacaggcccaggcctgtgtcccaagcagtacccaggctttgcagaccacgcggggcagggctccactgaagccacccccacccctcgccagctagctccatagggaagcctgtgtctcctgcccccagggcgcaccctcagtgcaggcacctctgttcccgctttgcccctggaggagccactattccagaaggctccaccctgccgtcctgcgggagcctgctgtccagtcctggccgggccaaggcctgggaaactgtgaaagtcagaaaggccagcngggagaggctggggcgangggaggagggggatcagcttctgctattaccgaccccccttcatgctgcccctggcgcctagaacccttgcccctcctcatagaccaagtcccgggggtctccactcagtcctgctgcctgcttcaccagaagcagccctgtgagtgtggggtggggaagtcccttcccaacggaggtcccagcctatggccctgggcccaggtgggggtcgcctgcttccttcccggacagggtcctgcagtggccaatggtgccagagggcaggtggcccaccctcgccgtcagggagggtggctggccccatccccactgccacccagccccacccactgttggaagagggaccagcgcgaggtggtgcccagggtgggcactgctgcttaatgcgaggcacacctggggccagctgagccccccgaaggctgcgggtttgccaaacacagagaggccaggccccagtgtcaggatgcagtcagcctctggcgcagtctttccacgacctggttcctggatgtcctgcttgctccacacccatctacagggaggatgtgagggggctctgcctcctagggccaggtcccccctctcgggagggggtattgggtaggaccatccaagaaagggcagaagaccaagggcagtcggggtctagaaaggagggcgctggccctgctgggcgcttcggagcccccactgtttcccactcagctttgtgctcagatcccaggtcccaaggagtgacaggggcttcctcccaccttctgtccttgtccagtcatgtaaataatgtgctatttctctccccgagtctttttttttaaaacctaccgtggttcctcagctaactgcattccctacccaggcagagactgtcctatgcctcgagcttccaaacgagactcagaccgcgacacagccaccgtatttatggaatgacaaaataaataaagcccaaaccanaaaa

SEQ ID NO: 482 - DNA, 2029 bp; single-stranded, linear
  immediate source library: LEUKNOT02
  immediate source clone: 1912826
gttcgggaagatctcaatccccgctggaatgaggtttttgaggtgatcgtcacatcagttccaggcaaagagctagaagttgaagtctttgacaaggacttggacaaggatgattttctgggcaggtgtaaagtgcgtctcaccacagtcttaaacagtggcttccttgatgagtggctgaccctggaggatgtcccatctggccgcctgcacttgcgcctggagcgtctcaccccccgtcccactgctgctgagttagaggaggtgctgcaggtgaatagtttgatccagactcagaagagtgcggagctggctgcggccctgctatccatctatatggagcgggcagaggacctcccgctgcgaaaaggcaccaagcacctcagcccttatgctactctcactgtgggagatagttctcataaaaccaagactatttcgcaaacttcagcccctgtctgggatgagagtgcctcctttctcatcaggaaaccacacactgagagcctagagttgcaggttcggggtgagggcactggcgtgctgggctcattatccctgcccctctcagagctcctcgtggctgaccagctctgcttggaccgctggtttacactcagcagtggtcaggggcaggtgctactgagagcacagctagggatcctggtgtcccagcactcgggaagtggaagctcatagccacagctacagccacagctcctcatcgctgagtgaagaaccagagctctcggggggaccccctcacatcacctcctcagccccagagctccggcagcgcctaacacatgttgacagtccccttgaggctccagccgggcctctgggccaggtgaaactgactctgtggtactacagtgaagaacgaaagctggtcagcattgttcatggttgccggtcccttcgacagaatggacgtgatcctcctgatccctatgtgtcactgttgctactgccagacaagaaccgaggcaccaagaggaggacctcacagaagaagaggaccctgagtcctgaatttaatgaacggtttgagtgggaactccccctggatgaggcccagagacgaaagctggatgtctctgtcaagtctaattcctccttcatgtcaagagagcgtgagctgctggggaaggtgcagctggacctagctgagacagacctttcccagggtgtagcccggtggtatgacctgatggacaacaaggacaagggcagctcctaggagctggcgagtcccagcctgactgctctgtcttcctgccttcgtctcgctccatcaccgcctcaatgtgatgagcctaaagctagggtccaagggcagagcctgtgccctttcagccctttcacctaacaggcccatattcgggcctttgcctgaccaaagagaagaaccgtatgttccctttactgcacggcctttatccttctgggcccctggggcggggacctgagctggctgtttcctgactttgcctgcacattgttctcccttcctcccaactcctcaagggccttctgtatctgtgcctggcaagtggcagcactagcagtggtattagcttatgccaaatacagctttggaaggatctttttttctttaactagatggtcaccttcttccctaccacacatgggtgggaagtgtggacaggctaacctctccagctgtgagcctcttagactactgcatgtagcaaatgttcagcagctcaggcccccatgtccagttctgtccccactgtcctcaaccctgtcctgaaaattctactgctttgatggctggggccagtctcttgtcactttggaaactgaggcgagtggattctactcaagcctccaagtagtggcataatcagtcttggagctcctaagctggtgatacgggagagggctttatgaggacttgggacagcaggggccaattttttgcccaagtgcctaagggttctaactcanttgnatagaccnaaatctaggnnctnaacaggttttanancaacanatgcca

SEQ ID NO: 483 - DNA, 719 bp; single-stranded, linear
  immediate source library: PROSTUT04
  immediate source clone: 1914645
ctgtaatgtggatccaagagggtgttttcgtttattttttcagaaagcgaaacagaggaagaaggttattttgaagcattcaaaaatgaacttgaagctttcaagtcaagagtaagactttattctcaatcacaaagttttgttggatctataggtttattagaatccttaccacagaatccagattatcttcagtattctatcagtacagctctctgcagcttaaactcggtggtacataaagaagatgatgaacccaaaatgatggacactgtataatttggttaagactgctgaggccaagtgctattttgttacaagaaaggaagaacttggctattttcttgacacttttatgggtgctgcactttatttttgttcggtttttgatgggagggaaagagtactgaaatgttttgtaaattttttttaatgtgctgctaggttttttgttttgttttgttctgaagagaagagtggtaccatatgttgcaggaagtcaaactggactttttgtggctactaaatttgcctttaatcttattgttctcaattttggaatcaagtatgaaaatctgcacaaatgcaatgtttacaagaactggttgattctgggaggcatctgctacagtctctttttatatggatatgtacatgtcctattctacaaaaatgattaaagataaaaacatacttgtatcccactgctactttagctg

SEQ ID NO: 484 - DNA, 789 bp; single-stranded, linear
  immediate source library: SYNORAB01
  immediate source clone: 192279
ctggaatggcccccaccgcctctatctgcaaatgagcacccatgggaaggtccgcttccgggacatcgnctcacccaagttctccatgccctcccctgtccgcacggtcatcaccgccgactttgacaatgaccaggagctggagatcttcttcaacaacattgcctaccgcagctcctcagccaaccgcctcttccgcgtcatccgtagagagcacggagaccccctcatcgaggagctcaatcccggcgacgccttggagcctgagggccggggcacagggggtgtggtgaccgacttcgacggagacgggatgctggacctcatcttgtcccatggagagtccatggctcagccgctgtccgtcttccggggcaatcagggcttcaacaacaactggctgcgagtggtgccacgcacccggtttggggcctttgccaggggagctaaggtcgtgctctacaccaagaagagtggggcccacctgaggatcatcgacgggggctcaggctacctgtgtgagatggagcccgtggcacactttggcctggggaaggatgaagccagcagtgtggaggtgacgtggccagatggcaagatggtgagccggaacgtggccagcggggagatgaactcagtgctggagatcctctacccccgggatgaggacacacttcaggacccagccccactggagtgtggccaaggattctcccagcaggaaaatggccattgcatggacaccaatgaatgcatccagttcccattcgtgtgccctcgagacaagcc

SEQ ID NO: 485 - DNA, 1362 bp; single-stranded, linear
  immediate source library: BRSTTUT01
  immediate source clone: 1922816
acccctcatcctcctcccagggccctggcgtctgggtcaagcagcnccccacacctcgacccctcaccccctcctcccgggctcttcctgcggcctcccctccacagtccgcaggctctgggacaggaccgagtccttggctgcctgtggagctcctgtgccagcagctgcgccccggctgcgctccggatacccccatccccgccaccgccgacctcccgctccaccgactgctgctcacgcccgacgggttcacgccgcccctgccccgtgaaggaccgcgctgcggtgcggaggcaggatgacgcaaaacacggtgattgtgaaatggggttgctatggcctctaggccatcccagcccacccacgtcaacgtccacatccaccaggagtcagctttgacacaactgctgaaagctggaggttctctgaagaagtttctttttcaccctggggacactgtgccttccacagccaggattggttatgagcagctggctctaggggtgactcagatattgctggggggttgtgagttgtgttcttggagtgtgtctcagcttggggccctgggactgtgctgcgtgcctcaggctgtgccttctgggcggggtctgtggtgatcgcagcaggagctggggccattgtccatgagaagcacccgggcaaacttgctggctatatatccagcctgctcaccctgacaggctttgctacagctatggctgctgttgtcctctgcgtgaatagcttcatctgggcaaactgaaccctttttatacatcgacactgtgtgtgatcgctcagaccctgtcttccctaccactgggtacagatggatgcggcgaagtcaagaggaaccaatggcagaaggaggagtgtagagcttacatgcagatgctgaggaagttgttcacagcaatccgtgccctgttcctgggctgtctgtgtcttgaaggtcattgtgtccttggtttccttgggagtaggtcttcgcaaacttgtgtggccagagctcccagcccctgaatgaggaaggatcagagaagaggctactgggggagaattcagtgcccccttcgccctctagggagcagacctccactgccattgtcctgtgagccgccaaagaccccacggggtgcccgcatgtccctgtctagggcagcccagggcccccactcctggctcctcacacttgcctcccctatggccgctctccagaccctcctcctttcttctccccacatccgcacctgctgttcccactctggggttctcaagtccatgaacagatattgttgcattttccacaatgctgattaaacataataaacaatccagaaaagcagttttgcccag

SEQ ID NO: 486 - DNA, 3110 bp; single-stranded, linear
  immediate source library: BRSTNOT02
  immediate source clone: 1927932
caaagttaatctagggcaccctagaatattcctgtcagaatccttattcttgcactgagaatagttatgtccttgtgctatgactggacagtgatttggtcatatgtgaagtatgaattgcttaatgtgacctgcttctctgaatttatttacagaaaatgaaagtgatgatgaggaagaggaagaaaaagggccagtgtctcccaggaatctgcaggagtctgaagaggaggaagtcccccaggagtcctgggatgaaggttattcgactctctcaattcctcctgaaatattggcctcgtaccagtcttacagcggcacatttcactcattagaggaacagcaagtctgcatggctgttgacataggcggacatcggtgggatcaagtgaaaaaggaggaccaagaggcaacaggtcccaggctcagcagggagctgctggatgagaaagggcctgaagtcttgcaggactcactggatagatgttattcaactccttcaggttgtcttgaactgactgactcatgccagccctacagaagtgccttttacatattggagcaacagcgtgttggcttggctgttgacatggatgaaattgaaaagtaccaagaagtggaagaagaccaagacccatcatgccccaggctcagcggggagctgttggatgagaaagagcctgaagtcttgcaggagtcacttgatagatgctattcaacttcttcaggttgtcttgaactgactgactcatgccagccctacagaagtgccttttacgtattggagcaacagcgtgttggcttggctgttgacatggatgaaattgaaaagtaccaagaagtggaagaagaccaagacccatcatgccccaggctcagcagggagctgctggatgaggaagagcctgaagtcttgcaggactcactggatagatgttattcgactccttcaggttatcttgaactgcctgacttaggccagccctacagcagtgctgtttaattcattggagggaacagtaccttgggttttgggttnttggaangncggaacaaganttaaaaaagggnccaagaagaggaagaagaccaaggaccaccatgccccaggctcagcagggagctcctgggggtagtagagcctggaagtcttgcagggctcactgggatagatgttattcaactgcttccagttgtcttgaacagcctggcagtgtcagggccgagtgggggtttctccccactgtccggcaagcgtcggtcagccgaacactgtgtgcctggtggtgtgtgttcacatgtgtgcgtgcgtgtgcccggcagagcagcaaacagctgcgcccgagagctgtggcgctttccctncctatggaagttccttttatgcattggaggaaaaacatgttggcttttctnttgacgtgggagaaattgaaaagaaggggaaggggaagaaaagaaggggaagaagatcaaagaagaaaagaagaaggggaagaaaagaaggggaagaagatcaaaacccaccatgccccaggctcaacagcgtgctgatggaagtggaagagcctgaagtcttacaggactcactggatagatgttattcgactccatcaatgtactgtgaactacgtgactcattccagcactacagaagtgtgttttagtcatttgaggaacagcacatcagcttcgcccttttacgtggacaataggtttttttactttgacggtgacaagtctccacctggtgttccagatgggagtcatattcccacaataagcagctcttactaagccgagagatgtcattcctgcaggcaggacctataggcacgagaagatttgaatgaaagtacagttccatttggaagcccagacataggatgggtcagtgggcatggctctattcctattctcagagcatgccagtggcaacctgtgctcagtctgaagacaatggacccacgttaggtgtgacacgttcacataactgtgcagcacatgccgggagtgatcagtcggacattttaatttgaaccacgtatctctgggtagctacaaaattcctcagggatttcattttgcaggcatgtctctgagcttctatacctgctcaaggtcattgtcatctttgtgtttagctcatccaaaggtgttaccctggtttcaatgaacctaacctcattctttgtgtcttcagtgttggcttgttttagctgatccatctgtaacacaggagggatccttggctgaggattgtatttcagaaccaccaactgctcttgacaattgttaacccgctaggctcctttggttagagaagccacagtccttcagcctccaattggtgtcagtacttaggaagaccacagctagatggacaaacagcattgggaggccttagccctgctcctctcaattccatcctgtagagaacaggagtcaggagccgctggcaggagacagcatgtcacccaggactctgccggtgcagaatatgaacaatgccatgttcttgcagaaaacgcttaagcctgagtttcataggaggtaatcaccagacaactgcagaatgtggaacactgagcaggacaactgacctgtctccttcacatagtccatatcaccacaaatcacacaacaaaaaggagaagagatattttcggttgaaaaaaagtaaaaagataatgtagctgcatttctttagttattttgaaccccaaatatttcctcatctttttgttgttgtcatggatggtggtgacatggacttgtttatagaagacaggtcagctgtctggctcaatgatctacattctgaagttgtctgaaaatgcttcatgattaaattcagcctaaactttttgacgggaacactgcagagacaatgctgtgagtttccaacctcagcccatctgcgggcagagaaggtctagtttgtccatcaccattatgatatcaggactggttacttggttaagggaggggtctagggagatcttgtccccttttaggaggaccacctttactttataattgaaggtactttggggaaagcggtttttccaaggaggtattaaatatccctgtatttcttaatggatcca

SEQ ID NO: 487 - DNA, 1149 bp; single-stranded, linear
  immediate source library: HIPONOT01
  immediate source clone: 1940690
gtttttggggccacatggcgcggaagaagataaagagcggagagcgcggccggaagggcccgggccctggggngcctggcggagtngggtggcccggggaggcgcgggcggcggccccagcggagactaggccagaagaactgagcattttcaaagttcccgaggagagatggatgccgcgtccccttcgcagcgacgagacttccctgccgtgtttgtgaccccctcctgcccagcaacctgccagctacaggagccccctgcgtcccagagactccctcacccaggcaggctccgtcgcggagtcgctgagtccgtgcccttttagttagttctgcagtctagtatggtccccatttgcccttccactccaccccaccctaaaccatgcgctcccaatcttccttcttttgcttctcgcccacctcttcccgcacccagcatgcagctctgcctccgcagcctcagtgcgctttcctgcgcgcactgcggagggcgccctgaagcgtcacccaagcacactcacttaaagaaaaaacgagttctttcgttctgtgcgcagtaaaaggggcgccctacatctccgtgccactcccgccccagcctagccccaagactttggatccggggcgagatgaagggaagagggttgttttggtttcggacgacccttgctctgaccggaagagaagtccctatcccacacctgcctgtgcacgttccctcccctttgccccagcgcactgttgagggcagcctctccagctctcttgtttatgcaaacgccgagcgcctgggaggctcggtaggaggagtcttccacggccccgccccgcccctgtcggtcccgccctcccccccgccgggctcctggggctgtggccgaaaggtttctgatctccgtgtgtgcatgtgactgtgctgggttggaatgtgaacaataaagaggaatgtccaagtgttcagagggtgccgggggagggagnttgggngcacaaggcctccgcttgcaacttgaacaagcctccttgggccaaaccagaaaccaacaatcgggggctggtggggtgaagtggaggggcacctaggttgaaacccacccctttgacccgaccaaacttcctgcctaccttttctcggacttcaagc

SEQ ID NO: 488 - DNA, 1069 bp; single-stranded, linear
  immediate source library: HIPONOT01
  immediate source clone: 1940966
cggctcgagcgagatggccgcgctcctggccgcctagagccggagcggcccgcggactgcggaggcagccatggtcggggcgctgtgcggctgctggttccgcctgggcggggcccgcccgctcatcccgttgggcccgactgtggtacagacctccatgagccggtcccaggtagccctgctgggcctgagtctgctgctcatgctcctactgtatgtggggctgccaggcccccctgagcagacttcctgcctctggggagaccccaatgtcacagtcctggctggtctcacccctggcaactcgcccatcttttaccgcgaggtgctcccactcaaccaggcacacagggtggaggtggtgctgcttcatggaaaggcctttaactctcacacgtgggagcagctgggcacactgcagctactgtcacagaggggctaccgggccgtggcccttgaccttccaggttttgggaactcggcaccttcaaaggaggcaagcacagaggcagggcgggcagcgctgctggagcgggcgctgcgggacctggaggtacagaatgccgtgttggtgagcccctcgctgagtggccactatgccctgcccttcctgatgcgaggccaccaccagctacatggatttgtgcccatcgcacccacctccacccagaactacacccaggagcaattctgggctgtgaagactccaacccttatcctgtatggagagctggaccacatcctggctcgagagtcactgcggcagctccgccacctgcccaaccactctgtggtgaagctacgcaatgcaggccatgcctgttacctccacaagccgcaagacttccaccttgtcctgcttgccttccttgaccatctaccttgaactaacccactcccagctcccagcctggcatgagcttggacagtctggaccgccaccctccctgaaccagggagacagcctctgggattggaggccagagggcaaggggtcagacccagccaggactcctcatttcatctcacagacacaataaaaaagcatatttgtcctgcctgggaagtg

SEQ ID NO: 489 - DNA, 1609 bp; single-stranded, linear
  immediate source library: KIDNNOT02
  immediate source clone: 194278
cccgaatgataccctttcatctctttgtgccatggatctgtgccatttgaacactcactccccttttttttcctttggagcagagaaccttctgcattcaagtctctcagttctttattatgatcagttacccatcaagagctgcttagatgtattaagccaaaaaagaaaaaaaaaatcctccgggtggaaattaattttcttggatgattctgtggagttggaaacatttatctgaagctgaattttctctccccagaattaaccttggtccgagctgagcagggcggcggcggcggtggaacctgcggggctggggcgcgcgncatgggccgcctgcactgcactgaggacccggtgccggaggcgtgggcggcgacatgcagcagctgaaccagctgggcgcgcacagttctcagccctgacagaggtgcttttccacttcctaactgagccaaaagaggtggaaagatttctggctcagctctctgaatttgccaccaccaatcagatcagtcttggctccctcagaagcatcgtgaaaagcctccttctggttccaaatggtgctttgaagaagagtctcacagccaagcaggtccaggcggatttcataactctgggtcttagtgaggagaaagccacttacttttctgaaaagtggaagcagaatgctcccacccttgctcgatgggccataggtcagactctgatgattaaccagctcatagatatggagtggaaatttggagtgacatctgggagcagcgaattggagaaagtgggaagtatatttttacaactaaagttggtggttaagaaaggaaatcaaaccgaaaatgtgtatatagaattaaccttgcctcagttctacagcttcctgcacgagatggagcgagtcagaaccagcatggagtgttttctgctgatttctgtccctgcatctcccctagccccgttccctgccctcctcccttccctgggtgactgctctgagaggcacttcactcacaggcctgtgggatgctccatggggccctgctggctccatgggggcccaggtgcaaagggtttctgaaaaacagcaggattaagtactgaaagagcccaacacaattaccctgtaaactctctgttagggcaaccaccaccacctgtcttccaggacacatttttagatactctgacaggccactgcatctcagattcaggggagaaaataagttgtcacctccccttcaaagttccagagtaaacaaatggtgccatcattcaagataacatgctgatcaccctcctcccaaaaagcaagagcttgtttatggctgaggaatcggcggattgtctgaatgacacatatacagagcccccacggatttctgcacactctgggtctgtgctggtggaacattgccaatcagttcttaatgaggcacctgtgtgtaaatacatgcttggtcttctctgcagagaactgaggctaaactctgtccctacttctggttttgccctgtcatgtcgtaacgaggtgggccttttgaggccattttagtttgagttcgagccaaccacctctgttggttagatgatgaataaaaaggttctgaag

SEQ ID NO: 490 - DNA, 1917 bp; single-stranded, linear
  immediate source library: BRSTNOT04
  immediate source clone: 1959635
acgcgtgggcggacgcgtgggcaagagtgctgctgctaacgcggtccccggcacgcaccatctgttgccatcccggccggccgaggccattgcagattttggaaagatggcaaagttcatgacacccgtgtatccaggacaacccctcaggctggggtccctgtgcggttcccgaggcagtttcgggatatgccctaccagccgttcagcaaaggagatcggctagggaaaggttgcagacttggacaggagccacataccaaggtaaggggtacaacaaataagtactcctctcagtttggtggtggaagtcaatatgcttatttccatgaggaggatgaaagtagcttccagctggtggatacagcgcgcacacagaagacggcctaccagcggaatcgaatgagatttgcccagaggaacctccgcagagacaaagatcgtcggaacatgttgcagttcaacctgcagatcctgcctaagagtgccaaacagaaagagagagaacgcattcgactgcagaaaaagttccagaaacaatttggggttaggcagaaatgggatcagaaatcacagaaaccccgagactcttcagttgaagttcgtagtgattgggaagtgaaagaggaaatggattttcctcagttgatgaagatgcgctacttggaagtatcagagccacaggacattgagtgttgtggggccctagaatactacgacaaagcctttgaccgcatcaccacgaggagtgagaagccactgcggagcatcaagcgcatcttccacactgtcaccaccacagacgaccctgtcatccgcaagctggcaaaaactcaggggaatgtgtttgccactgatgccatcctggccacgctgatgagctgtacccgctcagtgtattcctgggatattgtcgtccagagagttgggtccaaactcttctttgacaagagagacaactctgactttgacctcctgacagtgagtgagactgccaatgagccccctcaagatgaaggtaattccttcaattcaccccgcaacctggccatggaggcaacctacatcaaccacaatttctcccagcagtgcttgcagaatggggaaggaaagatacaacttccccaacccaaacccgtttgtggaggacgacatggataagaatgaaatcgcctctgttgcgtaccgttaccgcaggtgggaagcttggagatgatattgaccttattgtccgttgtgagcacgatggcgtcatgactggagccaacggggaagtgtccttcatcaacatcaagacactcaatgagtgggattccaggcactgtaatggcgttgactggcgtcagaagctggactctcagcgagggggcttgtcattgccacggagctgaagaacaacagctacaagttggcccggtggacctgctgtgcttttgctggctggatctgagtacctcaagcttggttatgtgtctcggtaccacgtgaaagactcctcacgccacgtcatcctaggcacccagcagttcaagcctaatgagtttgccagccagatcaacctgagcgtggagaatgcctggggcattttacgctgcgtcattgacatctgcatgaagctggaggagggcaaatacctcatcctcaaggaccccaacaagcaggtcatccgtgtctacagcctccctgatggcaccttcagctctgatgaagatgaggaggaagaggaggagnnnnnnnnnnnnnnnnnnnnnnnnnnnacttaaaccagtgatgtggagctggagtttgtccttccaccgagactacgagggcctttgatgcttagtggaatgtgtgtctaacttgctctctgacatttagcagatgaaataaaatatatatctgtttagtcttttaaaaaaacaaacaaaannaaaa

SEQ ID NO: 491 - DNA, 1320 bp; single-stranded, linear
  immediate source library: KIDNNOT02
  immediate source clone: 197958
ttggtggtgggtgggggcagcctgtatcagacaaaggtaaatcagccagccaggcacccnggagcctnagtcctgtgcagttcctgggcagcacagtggaagtgggagcctggtccttcccctgcccatggagagctctttaagggatcccagcctgcccctccacttctctcccaagccaggtcccggcatgggtgggttatgctcatgctggcaatacttgaaacgggtttattaatgctgggtattttgcacaattttatagacctcttttctacatagtcttttttaaaattggaaggagaaaatgtcagccaccattactgtctgtgtagtgccaggtgaagggttatcagaaggctggttggttttaataagtttattccaagagaccttctggctggaatgagtgagagtntgtgtgcatgtntgtgtgtgttcatgtgtgccctgtatgaatgtggctggctcccatatcccctgggctgccccctgccccatcccctttgagtgtcagaagcactctgagccaaggggacagggggcacgtgcactggtcacgagaaaaccctgggctcccactggggctcagcccagcctcctatctttccttcttctatggacttcagacagccagtgtctggggactctgccactctacccccagccctacccaccagcccccaggtgaggcttccagctgggacctgcccagacaggctgagcctgggcgtggtgggtggggtgatggctctggggagcggctgccatcctacaagccacaccccctcctctgagctctgaatatgggacccagtgccaggagctggaagacaaggtgtttctgccaaacggggacctccatccagagaaaaggaagaaggtgcagggtgggccaagaggcaagtgaaggttggcctgagtctgggccggaaactcagaggatgtttctcctctgctgggagctgtagtttcttatcaaaatagatattgttccaccatccccctccttggcccttcaagtgggctgaagcccttggaaagtgacataggaagtccccagatcttgcccttctcactccagaggctagtggtcacagacagctgggaatggcagccacagagggtcccctctgggagaaacagcttcaccccagcctcagggccctgggccatcactgcagtggccctgggaggtgaggaagaagctggctagaggagggggctcccacctaccttttatttaagccagtattctttgttcctgcttgtaataaaacttcagtttataagagttaaaaaaaaantanaaggtgagga

SEQ ID NO: 492 - DNA, 227 bp; single-stranded, linear
  immediate source library: KIDNNOT02
  immediate source clone: 198126
tcaggttatttttgtctatcttatctgtaaggtggaaatactatgtagcactgtgctcctgcgcctctccttccaactcaggttgttggcttgcaaaccaggcaccgtgggaagtatttataccagtgaaattgggaaaggcttacaaatcaatgctcctcatcccttttttggagaactgattgttacatgtttaccagaacaccactgaccatggtccttaaagt

SEQ ID NO: 493 - DNA, 440 bp; single-stranded, linear
  immediate source library: MPHGNOT02
  immediate source clone: 199094
aaataaaatggggagaatggggnaattttangnaattcctgcggaatgggngttcacagtgttgggcctcggctaatttaangncttatgngggtaaattatcaggtagncgggttatatccncattactactgtgcaggctaaaatttggggaaaagatgaaaaatccccatttgtcttcccatggtcacagaatgttttgtgtttattattatgcaataaattattgaccggaagagtaggcttacttctaaaacagagaaaatatatctttgaatcaggtgataatagtgtagaaggaatttgattaaatgcatacaaccaatatgatttctagcattaaattgcaatgtatattgtgttagtgaaaaaatcattagtaaaaatatagtccagtggtgtatcctgcttgaatagagcaggctggatgcggtggtttg

SEQ ID NO: 494 - DNA, 388 bp; single-stranded, linear
  immediate source library: MPHGNOT02
  immediate source clone: 199150
gagaaagccagttttcattagattttcaaagtagtctctggtcctaaaacaaaagggctaatcacccaaaagtgtttatatttggggaaatgcttatttttctcagacccgtttctctcaccaatgactgttttctctgctcagtctgtgtgggtgatgtctttgttgttgttgctgggtagtgactacttatccagtccttcccatccatctcagtggccataaatgaataatgcgatgtgtgggaccctgcttggtggttgggcggggaggagtgaggaggagtggttgaaatggctaaaaccctgacagccagtcagagatagcccctgcaagaatccacaacagcaaaggtgcttacttatgcctnggggtttgggaggnggtt

SEQ ID NO: 495 - DNA, 388 bp; single-stranded, linear
  immediate source library: MPHGNOT02
  immediate source clone: 199173
gttgggaagcaaacataaacaggcttgcctgtgaacagctggaatatagttgcagccctttgaaataagacaatcttagttttccttccttctccttagccagccatctagcgtaggaaacaggatgctgtgtacgtaccctgagtaggaggagagggttccagagtgccacttggctgctcctgtgtacccattcttgttcaagagcaccttgagatcacatggtcttaaatgccaaagctgaccaagagctgcccctctnttcagcttcgtcgtccctggctgttggggaggactttntctgtctgactgccgctgggctgccttnccccagctccctggggtcctttgctccgtaatccatnagctcttcttttctcttcttctt

SEQ ID NO: 496 - DNA, 67 bp; single-stranded, linear
  immediate source library: MPHGNOT02
  immediate source clone: 199305
ggccataccaaggctatgtaaaacgattcacattagaacttctaattgtttggaattaagaaaattt

SEQ ID NO: 497 - DNA, 1601 bp; single-stranded, linear
  immediate source library: MPHGNOT02
  immediate source clone: 199690
gcaagagctggtttttattatataggacctggagatagggtagcctgctttgcctgtggtgggaagctcagtaactgggaaccaaaggatgatgctatgtcagaacaccggaggcattttcccaactgtccatttttggaaaattctctagaaactctgaggtttagcatttcaaatctgagcatgcagacacatgcagctcgaatgagaacatttatgtactggccatctagtgttccagttcagcctgagcagcttgcaagtgctggtttttattatgtcgcaatgatgatgtcaaatgcttttgttgtgatggtggcttgaggtgttgggaatctggagatgatccatgggtagaacatgccaagtggtttccaaggtgtgagttcttgatacgaatgaaaggccaagagtttgttgatgagattcaaggtagatatcctcatcttcttgaacagctgttgtcaacttcagataccactggagaagaaaatgctgacccaccaattattcattttggacctggagaaagttcttcagaagatgctgtcatgatgaatacacctgtggttaaatctgccttggaaatgggctttaatagagacctggtgaaacaaacagttcaaagtaaaatcctgacaactggagagaactataaaacagttaatgatattgtgtcagcacttcttaatgctgaagatgaaaaaagagaagaggagaaggaaaaacaagctgaagaaatggcatcagatgatttgtcattaattcggaagaacagaatggctctctttcaacaattgacatgtgtgcttcctatcctggataatcttttaaaggccaatgtaattaataaacaggaacatgatattattaaacaaaaaacacagatacctttacaagcgagagaactgattgataccattttggttaaaggaaatgctgcggccaacatcttcaaaaactgtctaaaagaaattgactctacattgtataagaacttatttgtggataagaatatgaagtatattccaacagaagatgtttcaggtctgtcactggaagaacaattgaggaggttgcaagaagaacgaacttgtaaagtgtgtatggacaaagaagtttctgttgtatttattccttgtggtcatctggtagtatgccaggaatgtgccccttctctaagaaaatgccctatttgcaggggtataatcaagggtactgttcgtacatttctctcttaaagaaaaatagtctatattttaacctgcataaaaaggtctttaaaatattgttgaacacttgaagccatctaaagtaaaaagggaattatgagtttttcaattagtaacattcatgttctagtctgctttggtactaataatcttgtttctgaaaagatggtatcatatatttaatcttaatctgtttatttacaagggaagatttatgtttggtgaactatattagtatgtatgtgtacctaagggagtagtgtcactgcttgttatgcatcatttcaggagttactggatttgttgttctttcagaaagctttgaatactaaattatagtgtagaaaagaactggaaaccaggaactct

SEQ ID NO: 498 - DNA, 228 bp; single-stranded, linear
  immediate source library: MPHGNOT02
  immediate source clone: 199812
ctcaatatttatttcaaaaagcgtaaggttctttacanatccatggttgatattttnccatcattgtnctgacaaaaatccatgcttaagggagcttattttgtacttgggaaagacaggaaacaaataaatacaaaatgtcatgtatcctatagtaatacattaagtagagaaggcagtagggagaattgggagagtgagttgtgctttacgtnncttcggctcggc

SEQ ID NO: 499 - DNA, 267 bp; single-stranded, linear
  immediate source library: BRSTTUT03
  immediate source clone: 1999147
aattgccaccggtggaaatgaccacaatatatgcattttctcactggacagtccaatgccactttatattctaaaaggccacaaaaatactgnttgtagtctatcatctggaaaatttgggacattacctagtggttcatgggacaccactgtaaagtctggctgaatgacaagtgcatgatgaccttgcagggtcatacagctgcagtgttggcngtaaagatcttacctgaacagggcntaatgttgactggatcagcagacaag

SEQ ID NO: 500 - DNA, 340 bp; single-stranded, linear
  immediate source library: MPHGNOT02
  immediate source clone: 200015
gatcttccttggcancctgttcacacacaaattatacagcgagtaccagtagggttagggttttgcatccagggtgacagcctcagctcagcccaggntgaaactactccaccaaagggcaggcaggtcagacccatacatcagaaaatgccccagagtttnctcaagcgtgagatgaaggagtntgaggccagaaccaccaggncaaggggacgtggcctctnggagaggaagagctaggcaggtaaattcagaaagttcccagcccccttagctgccnagtcagttcaaaangccaaggtnggcnagngcggtgggtcaggctgtggtccccacattt

SEQ ID NO: 501 - DNA, 323 bp; single-stranded, linear
  immediate source library: MPHGNOT02
  immediate source clone: 200044
ggatattgtgcaagttttccctctcatttccagggaaaatttctcaaaatattgaaagatttctgtccatggcagacttgtagttgggaatttgcatgaccagcttatagcttgtacaatatggttcagttttgtgcatctattaatttcaacctgggccaccaaactgcattgttaagaactagaggctattggctgggcacagtggctnacggctgaaaatcccaacaattggggggccnangttgggggntcaccaagtcaggggttaagnncnagccnggcnacatgnggaacccccggtttttttaaaatttnaaaaa

SEQ ID NO: 502 - DNA, 1371 bp; single-stranded, linear
  immediate source library: MPHGNOT02
  immediate source clone: 200097
agacaaagtcctagaactttaagcctagaagagagccttaagtattattttctatttctatttgaagtcattttatagatgagaaaaagaggtggcttttgccactaatgacaagtgaggattaaagtacctaatgtactccaaataactttgtaaaatatagagcacattctaaatgaaaagtaattttattatggcatgacttctccaaagtcttaaggtgtattagtgggactcaggtattaaagtataggtctgatcataaatctggcttactgttcatcttcagcaaaaggctagatatgtttgagaaagacatgggacattctctcttttgtttacattgacttttagacttctcattcttcatttacgtttcttgagtaaaaggtatacataagtgtcttaataatttcaagtaaagagaactaatttagtatgcctgaaaatttagtgatcaaaacatagcaagaactagttggagtgagttactttaaatgcccctggttttaatttcagaatttttaaaaaagccttaaatttttgaggcttttgattgttgtttgctttctcactcattccaatgtcaaagtttaggtagtaaaaataccctgtggttagtgtaactgcccttaacttctttctatttctttctttcctctctctgaaactgaagatgataaattggaaagttttaccacttggattgttaagccttgggttctctctgccactttgcagagctgttagcatggaaagttgaacgtgagatggtgattccagtttgaccctctccctacaccctagaatgtttctgcacaatgaaccagattatgtaaagctctcacagctcaaatataatttctagactcttgagtcatattaccaagatcctagtggagttaggtacaatggtgttggcagctgccttgtaaatagtttaaatcaaataagtctaattcacagcatatagagacacatttttatgtatttagccaacttaaaatcagtcttagtatgtgtagatccctaagttagctgatactgcaagtattttgccataaaatttggataaataataaactattaatgtaaattatttaaatgtcgggaaaaatcaagggaaaatgactcgaggaattgagcatcttgggataatatttattaagggaaattattccagaagatccttgagagtctaacgttagctcttttttctccataatttctaatcattatttacatttcaaagtagaacaaagtaaaagaaaattccttagtatataatgtaagaaattaaaagaaaatttcgaattcttaagtgagtaagaaagcttagtgttttggttattggaataagatacagaaaac

SEQ ID NO: 503 - DNA, 360 bp; single-stranded, linear
  immediate source library: MPHGNOT02
  immediate source clone: 200212
cccacctgctccgaaatcatgtctgtctcacaccataatttaaaataatgcttcctcagaaaatgttgttgacctctcttgtctactgtgtctccttttgcacttgtgtcgtgcctcagtggcatagtggagttagcagtgttggtttttgcctcttcaggcaatctgagcttgcacaagccacttagcctctctaactcccaatttccttatctacaaaatggtgctaaatgttaacctacacttctaagggatgttgtgaggactgaatgagctgtgtgtgagtcagtggtggtgggctgtgtagatgttggggatggcatttccagatcagcctcctttcgggggggcaggggtctt

SEQ ID NO: 504 - DNA, 830 bp; single-stranded, linear
  immediate source library: TESTNOT03
  immediate source clone: 2006402
gccccgccccgccgggttcccgctcgcccggcgccatggatccgctgtcgccgccgctctgcacgctgccgccgggccccgagccgccccgcttcgtgtgctactgcgaaggggaggaaagcggggagggggaccgcggcggcttcaacctctacgtgaccgacgccgcggagctttggagcacctgcttcacgccggacagcctggcggccctcgtggaaagcccgttttggcctgagtgcggctgaggacatcaccccccggttcagggcagcctgtgagcagcaagctgtggctctgactctgcaggaggacagagcatccctgacgctttcaggggggccctcggcactggcctttgacctctccaaggtaccaggcccagaggcagcccccaggctgcgggcgctgacactgggcctggcaaaacgcgtgtggagcctggagcggcgactggcagctgcagaagagacagctgtcagcccgaggaagagcccccggcctgcagggccttcagctcttcttaccagacccagatccccagagaggtggccctggacctgggagtcaggaggcggtgtccaggagagtcgctcatcaaccccgggttcaagagtaagaaaccagctggtggcgtggacttcgatgagacctgaaggtgcagcacaagcgtggccccgcggggagtccgcctatgaggggagaggcagtctttgaggcccccatcagagaccccccgccaccacctccacctgcctgtcctgggccaggactaacacggctcctcaaattccttccctgtcaaataaacagctcccttggttggaaaa

SEQ ID NO: 505 - DNA, 287 bp; single-stranded, linear
  immediate source library: MPHGNOT02
  immediate source clone: 200844
ctcaaatcttcaaagttcctttttttgtctttctctattaacagacaaattaaaagggaaggttcaagtatatgaaatgaaattgtgatgctccaggaacagttttaggtcttacgtttctcattggaagaaaagtcctctgtcaaaaagaaaattttgaaaagtttaaattatctaaaaatatacagtgcccctaaacttaacatatataatgagtgtatggcctggaaatccaatctcttcataggctatttgcacatgcaatatcaggaccatacttacagttt

SEQ ID NO: 506 - DNA, 409 bp; single-stranded, linear
  immediate source library: MPHGNOT02
  immediate source clone: 201349
ccttttttcacttagctgagagcacagccattgggaagaggctctgaacctgacaagctttcatgtggagaggaagagaagggtctggcagcagtggggagagcaagcaccagagagaggagcccaggaaggaacagtggggacgtggggcactggggttttcaaatggggccgaagcccttctccttttccctttgccagggctcagacagcggcccaaaagcaggccttgaggagagtctgagtagaaataagttagagctggtaattattcagagaggggtaaagccttagatttcgtgatggagagaaagcaaagaaacccatttttatataggagggagacctgtgctataaacactgaaaggcagcctcttagatggnagtgggaactacaagnngccacatt

SEQ ID NO: 507 - DNA, 333 bp; single-stranded, linear
  immediate source library: MPHGNOT02
  immediate source clone: 201358
cccanccngcccccacagaccgatcatngagagaccgntcgctgtaagtnggncgctggtncaaaagggattagngccgtggaggtgtgtgtgtccatggcatccggagcgaggcgactgtcctgcgtgggtagccctcggccggggagtgaggccaccaaccaaagtnagttccttcccacctgtgtttctgnttcgtttttntntttccnntnttnctatatatatttnntgntgaatctatttaattttaaatctctcttctcctccagccacaatggcnccngctttntccccgaatnggggngtccgnttcccccttnnggaagcggg

SEQ ID NO: 508 - DNA, 2399 bp; single-stranded, linear
  immediate source library: MPHGNOT02
  immediate source clone: 201392
cgatgacttggcgggcggacaggaaggaaaccgctcccgagcacggcggcggcgtcgtctcccggcagtgcagctgccgctaccgccgccctctgcccgccggcccgtctgtctacccccagcatgagcggcctgcgcgtctacagcacgtcggtcaccggctcccgcgaaatcaagtcccagcagagcgaggtgacccgattctgggttgggagcgcatccaattaccagctaggtggacattttccanggcaaacgncctttagggatgagatggcgagctttggcaggcaaaccccaagggcaaccccaacccagattgtcaacggggaccagtactgtggggactatgagctcttcgtggaggctgtggaacaaaacacgctgcaggtgtttctgaagctggttnagtcaagcgttttccagagtttcctnntggcttcntaacaaaatccccnagccttaactggccatnaggaccttttagcaactcctgtattctnaccacttttttaatttatataagccttaatgaacagtgtctatacatttgcatacacacacccccaccccagagtgttctcagtatgtcagagaaagtgccacagcattaggacgggagcttggagaacgttttctagaaaagggttagcttcctgttggcatgaaattttccaagcaaacctcattaaacatctgttgtttgttaaagatgttccactgaaagcaacgcatgtttcaaaggcacgtctttccgttcgttggttttctgtgtgtaaggagtagcattgctgttggcgcctaacctcgcgtgcactgcattctcaaccccgtaccagtgcatcatcagaagccttcctcgtgaccataactctgtgtctgcagatatgtgtttccgtgtaagccatttttcccctttacttagactgatttcacctagattgtcacggtttccttcatgttaactttgcgtgactttgttcttcctttactactctgtatgtannnnnnnnnnnnnnnnnnnnnnnnatgctgtccaaatatatttgtatatatttgtatagcatttttacacctttattgagtaatctggtttcgaaaggaggtgagagtttagtcccttctgcagttttctccaagctgtgtcctgtgaatttcaacccttggagcctaagaaaaccctaggaagatgatgttaatttgctgtcatttcctaattcaggatctatcatcaaatgaaacatgaaaaaaacagtgacttttaaggtgaaaagagtttcaagcattccaaataaattatcaatgtttcataactttttattataaacccacctcctaataggaagccaagtactatttgatacagtggtaaaaaccaaactaccttgaatttttttaaggcaacttatgaataatgctcattttcacagtcagaatagctttaaaatatggttgaatttgatacacacaggaagttttcttgaaggacaattctttcgnttttcttttttcttgagaggtctaaaggggcggagcaggaaggaaaccgctcccgagcacggcggcggcgtcgtctcccggcagtgcagctgccgctgaccgccgaccctctgacccgccggcccgtgctgtctacccccagcatgagcggacctgcgcgttctacagcacgtcggtcaccggctcccgcgcaaatcaagtcccagcagagcgagagtgacccgaatcctggatggggaagcgcatccaataccagctagtggacatcttccagggcaaacgccctgagggatgagatgcgagccttggcaggcaaccccaaggccaccccaccccagattgtcaacggggaccagtactgtggggactatgagctcttcgtggaggctgtggaacaaaaacacggtgcaggaagttcctgaaactggcttgagtcaagcctgtccagagttcccctgctggactccatcaccacactccccccagccttcacctggccatgaaggaccttttgaccaactccctgtcattcctaacctaaccttagagtccctcccccaatgcaggccacttctcctccctcctctctaaatgtagtcccctctcctccatctaaagggcaacattccttacccattaggtctcagaaattgtcttaagcaacagccccaaatgctggctgcccccagccaagcattggggccgccatcctgcctggcactggctgatgggcacctctgttggttccatcagccagagctctgccaaaggccccgcagtccctctcccaggaggaccctagaggcaattaaatgatgtcctgttccattgaaaaaaaaaaaaganaaagaaaaaannaaaagagaaaataaaaaangnaaaanaaagaananaanaaa

SEQ ID NO: 509 - DNA, 485 bp; single-stranded, linear
  immediate source library: MPHGNOT02
  immediate source clone: 201507
agaagactaagaaaagagataccaaagtcgggactatcgatgatgatccagaatatagaaagtttttggaaagttatgccacagataatgagaaaatgacatctactccagagacactgctagaggaaatagaagcaaaaaatagaggaattaatagctaaaaaggcaaccccacttttgagcttcctgaaaaacaagcagaggaatnagagaaggaaagggagaaggaaggaggaggaggagaagaagactaagaaaagagataccaaagtcgggactatcgatgatgatccagaatataggaaagtttttggaaagttatgccacagataatgagaaaatgacatctactccagagacactgctagaggaaatagaagcaaaaaatagagaattaatagctaaaaagacaaccccacttttgagcttcctgaaaaacaagcagagaatgagagaagaaaagagagaagaaaggaggaggagag

SEQ ID NO: 510 - DNA, 264 bp; single-stranded, linear
  immediate source library: THP1NOT01
  immediate source clone: 2016903
gctggcgggaccaagacttctactgggaggctgagtggcaggagctggagaagcgggactgtctgaccctcatccctgccttctcccgggaacaggagcagaaagtatatgtgcagcaccggctccgggagctggggtcgcttgtgtgggaactgctggaccgccagggtgcatacttctacctggcaggcaatgccaagtccatgccagcggacgtctcggaagccctgatgtccatcttccaggaggagggtggactctgca

SEQ ID NO: 511 - DNA, 361 bp; single-stranded, linear
  immediate source library: MPHGNOT02
  immediate source clone: 201696
agggtctcttgcatctcccatgtactgcttgtgtgtgggtgtgcgtggggggttcatatgcagttccctgggtctcagcgatggatggcccgtgctctgtttgtaatcatccacggaacctcaggcgtggtctggttcctgatgagaacaaggatgccgttgtcctatcgaggaacctagctctctggggagccctgaccctggtcagcagcttgctctgtctgtggtttgatctgggaatttggtatcaggagtataggcccattaaaaaagaaaagctcagacccggnattgtgggtcaaggatttaaacccagcantttaggaggncnaggtnggaggatcanttnaggtcaagagtt

SEQ ID NO: 512 - DNA, 413 bp; single-stranded, linear
  immediate source library: MPHGNOT02
  immediate source clone: 202259
ccccatgggntcaanggaantnnggcacngcgantttctgctccctgggggtantactttcataccctttggaactgcagttacattattgctctgaaacaaacatcaaaatagtatttgctcttttaagaataattttttaggccggcacagtgggtcgcgcctntaatcnnnnnnnnnnnnnnnnnnnnnnnnnnnnnnnnnnnnnnnnnnnnnnnnnnnnnnnnnnnnnnnnnnnnnnnnnnnnnnnnnnnnnnnnnnnnnnnnnnnnnnnnnnnnnnnnnnnnnnnggcntngtggccgggntgccttgtaatcccnagctnanttttgaaagaatttgaggcagtaagaaatcnactttgncaccctggganggcaanaaggnttccagtnaagccttagntttcacc

SEQ ID NO: 513 - DNA, 448 bp; single-stranded, linear
  immediate source library: KERANOT02
  immediate source clone: 2024815
ctggaatgatctggctttggaatttcactatatgaggtctctgccgaagcatgagcgattggtggatctccatggttcagtcattgactacaactatggtggtggctccagcattgctgtgctcctcattatggagcggctacaccgggatctctacacagggctgaaggctgggctgaccctggagacacgtttgcagatagcactagatgtggtggagggaatccgcttcctgcacagccagggacttgtccatcgtgatatcaaactgaaaaatgtgctgctggataagcagaaccgtgccaagatcactgacttaggattctgcaagccagaggccatgatgtcaggcagcattgtggggacaccaatccatatggcccctgaacttttcacagggaagtacgataattccgtggatgtctacgcttttggaattcttttctgg

SEQ ID NO: 514 - DNA, 2567 bp; single-stranded, linear
  immediate source library: MPHGNOT02
  immediate source clone: 203852
cggcacgagcggcacgagggctggtgctggggcttcttctcctgaaggggctgcaagagggaaggcttagccatgtcgtccttgaatcagaagggtgatcagcaccgcgaaagccccaggggccattggaccctacagtcaagctgtattagtcgacaggaccatttacatttcaggacagataggcatggacccttcaagtggacagcttgtgtcaggaggggtagcagaagaagctaaacaagctcttaaaaacatgggtgaaaattctgaaagctgcaggctgtgacttcactaaccgtggtgaaaacaactgttcttctggctgacataaatgacttcaatactgtcaatgaaatctacaaacagtatttcaagagtaattttcctgctagagctgcttaccaagttgctgctttacccaaaggcagccgaattgaaattgaagcagtagctatccaaggaccactgacaacggcatcactataagtgggcccagtgctgtgtagtctggaattgttaacattttaatttttacaattgntgtaacatcttaattaaccttttaattttcacaattgatgccagggtgagtttgatgaaaatatctgaagctattatggaataccatgtaatagggagagttgaacatgaatattagagaaggaatccagttacttttttaaattacacctgtgtgcacctgtattactgaatataggaaagagatacccattacatagttactcagtaaacaaaagagaaataccaggtaggaaagaagagttactattcctgagaaataatcaagaacatatttaatttaaactaatgatgtgaactatttagttttgatgtccgttatgtgattctgcttttacttgagtaaaattaaagtgtttaaatttgagatcaaggagaagatagtggaacaaaatgttatatagataatatttttctaatggaaataaaataggcagatgacactcctgtccaggacactaaaatgtgaagaacagctcattgtgccccagtgatgaagttgctggacacatctctttgcaggtagcagcaaacagttgtagcagcagcagacgaagccattgcagaggcagaatatgctgagtgtctggagtcagcctgaagacacagggtggattatttcctggcctccacaccaaacgttcccttgcagatggagactgaatctgagggcagcagacttttatcagcttgagtttatgtcatttgatggacttggttcaacaacaagaccttacttaaaacaatgtactgtggtgatgagtcccaggggcactggtcagcctgtggagccctgnatgctatccacacccacctatccctgcagctaatttagctgatctctaatttaactgagctctaatttagctgatcagattttgcttgggtaaagttcctttttaatgttctaaagtgtttacggttctcaaatatcagttaaaaactaattttaggtggccataaacataaaatagaaaccctgtaagttacagaagaccctaaattgtatcaaaaccctagagacaacttttcaatttgatccaaatttgaactggccaaccagtctttaaaacactggactagaagagataatgattgaaacatttaaaaaaaaaaagtgctccattcgcaggagcttttcctgtcctgtggttttccagttggtgaccaccatgggaggtcgctggctcggctcactcccttctcccacccttgagaatgtggagaactcccatggagaggcagaatggcaggaggtttcatgtcccgcgttgcatctcctcctgaaagaaaagcagtgatacctgggataatgctggctctccgattgatcctgtgaggatgaatttgcatttccagaatccttgagcatggattagatgtttcctgggaggtgccttgagtaccattatgtgcaagctacataattaaaacatttttcttagtttccctgggaagcttttcttgactcacagcccaggttcttctgcccaacacaaaaggagtgagttggggtctttagtctcttcttattgggtagctcttgctttaatattctgtttggtgagtgtaagggattctgcaagggacagggggcctgactacccagtctttgacttgtatcctctcccctcttcatacactcctgctgaaaaatgttaatccaaatacacatttaaacttagggtcggtccttattctgatttgagtattttaatgtctcagtgtgctgatttggtagttggaagaattattcttctggaggtctgttagactacatcctacactgacttcagaaaacagtctgtcagacaaaaaggccttatgtcaccactggtacctcagtttcctcatcccatttacagtttttctaactccagggtagtgtttagtgttaatatttgggatatattttttttcaaaactgtttttaagtagtttgtaatttgtaacaaacttgtaacctggttgggactgatattgtcatagctatgataaactttggatattagcagnaaaaaaaa

SEQ ID NO: 515 - DNA, 1627 bp; single-stranded, linear
  immediate source library: MPHGNOT02
  immediate source clone: 203960
cagcgtccgcgtcgatagctagtcgttctgaagcggcggccagaggaagagtcaagggcccacgagcatcgggtaggccatgcctttattgggacatccaggaaaaggttcggccttaacatagatcgatggttgacaatccagagtggtgaacagccctacaagatggctggtcgatgccatgcttttgaaaaagaatggatagaatgtgcacatggaattcggttatactcgggcagaagaaagagtgcaagattagaatatgatgatttcgtagagtgtttgcttcggcagaaaacgatgagacgtgcaggtaccatcaggaagcagcgggataagctgataaaggaaggaaagtacacccctccacctcaccacattggcaagggggagcctcggccctgaacagagcagctgctgatgtctggaggctgattttcctgttctctgttctccactggaaaggttgtttacgacaaacctccttgtcaaagtgtgtaaaaataaaggattgctccatcctacggctcgagctgcggtgctggtatttagagcgcagggcgtggacgggccggatcgccttcgccgccgcccgcccgcaaaccttcgtgcccggcccgtcctcgcccccgcctccgccaccgcctcggcccgcagagcttgccccctccccacccgcagacatgtccgagtccaagagcgggccccgagtatgcttcgtttttcgccgtcatgggcgcctcggccgccatggtcttcagcggcctgggcgctgcctatggcaacagcccaagagcggtaccgggnattgcggccatgtctgtcatgcggccggagcagatcatgaagtccatcatcccagtggtcatggctggcatcatcgccatctacggcctggtggtggcagtcctcatcgccaactccctgaatgacgacatcagcctctacaagagcttcctccagctgggcgccggcctgagcgtgggcctgagcggcctggcagccggctttgccatcggcatcgtgggggacgctggcgtgcggggcaccgaccagcagccccgactattcgtgggcatgatcctgattctcatcttcgccgaggtgctcggcctctacggtctcatcgtcgccctcatcctctccacaaagtagaccctctccgagcccaccagccacaggaatattatgtaaagaccacccctcctcattccagaacgaacagcctgacacatacgcacgggggccgccgcccccagtagttggtcttgtacatgcgcagtgtcctagtgcccatcgtctgtttccccggccttgcccccgaccggcccgtgccgtggacatctgggcccacttattggccctccaggcccccggcgccccaccccctagagtgctctgtgtatgcggatgatttagaattgtcatttctctttactggatgtttatttataaagatctggcctgttcctgcgtctgcggacggcccttgtctcccngctatctataaccttagctagagtgtcgcttgtgggtcctgttgctgagacttcctggatggagccgccttnacggcggggcccttggccctgcgcggaactgtgnccaanaaagtnttggatgtaaa

SEQ ID NO: 516 - DNA, 355 bp; single-stranded, linear
  immediate source library: MPHGNOT02
  immediate source clone: 204502
aaattaaggcctagggtgggaacataatcaaagccaaagaacaagccatgcttaggggctcagaagtagcctactgtcactggagtaaaaggttacggtatgtagtggaagacaaggtcaaaaagtagcacatatgaagatgagcatgctaggtgaaggaatcggaactttatccnggagagcagtgagaagccaaggaaagattttaactagaggagtcaaagaacagctgtgctttaggaaggttaatctggntagangngggnnggccttttaggcaaagatcaattanggnggtgcttatanccaatnncngtttgtngntaanngctgnaggcngtnttgcaaagggagg

SEQ ID NO: 517 - DNA, 2627 bp; single-stranded, linear
  immediate source library: THP1T7T01
  immediate source clone: 2045226
attctttttttttaacttctattccatttaattgtaggntatctttggcccatataaccaggggtcctgatttgaatgtactatttgatccccattgtgttcaggcaaaaaataggnaatgagtaaatttgaggttgaaanctctcccagaagncaaactactttagtggagtaaaagctttgacaatttatggtttaattcaataaagggggttaaattaattcaccaaattaatcaggtttacagacagggtcccaccggtattcacattcttgttagtgatcagatggttcagaattttcaagatgagagttgttttttattctccacagtaaaagctgaaagtagtgatggcatccacataattttgaagtgatgtcttatatagactganctgtattcagtaccaaatagtcacgcttaaaagtgtgtgaagactgantccaagaagtctttgggattggtttttaccatatgaaatgtttcatattgaaaacacaagatgacctttctaatgagctgtatgagaggtgaatctcctcactgtcactgccatagccaagcatcctcatgagagtgagcacatcggcacagcatgcatccagctctggaggccacggtgcaggcatagctgcctgctgctctggcagaggccagtaaatacagttcctagaagcagcctttgctgtctttttacactgtatgcggtttggaaatgaatgtaggaacttacttgtgggcatttacctttctgtgccagtttggcttttattgcctgaaccttatgctgacctggagaggagatgggggacagtgctgttgtggggccagcagtgaatctgtatgcggagagttgtgttgtgctgatgtggccgttggtggtcaggtaagaggctcggcaccttcttggaagaaatcatgtctgagggtgtacgtttgatatgatcatgccagattggagaagatccaagccaggaagatgggcttgaagcaaactgcattatcaggagtaccttggttagaggatcagtgtaaatcctaataggtacaaagacttttgtgttttggctttgtcacagatttattgaaaaacttttttgcttctgcttccatttttagcattttagtttctggttttcatttttggagattccttgccttttaaactcgtggtttttctctcattttcttccctctctccctccatctctgaccacccccaccctaaccccccacccccaccatcctattaaacatttttaaagccctaccccagacattggaaataggtgacccaagtagggggagaaagtattattgttgatagcttctgactaggtgttaagggatcttcattatgaacaagatgaattttttttctggaaacactagatgttatcaatcaaacactaaaatgtaccatacaaatcccttaagcctctcaaatattgagctttagtacaatcatggatagacattctggtgatgatttaggggctttttatacaccacatactagcttctttctctataagagtgcctctttcataaaaccaaatgcttgtctgctagcatacttttcaaagggaatccactgttttctcactttcctcccatatctccgtccttcatccaaaaccttcccagaatccatcagcaagcatgtttgaggcctgtggtgtaggggactgaattctttttttttaacttctattccattttaattgtaggatatctttgtccatatacccaggtgtcctgatttgaatgtactatttgatcctcattgtgttcaggccaaaaaaataggaaatgagtaattttgagtttgaaatctctcccagaagacaaactacttcagtgagtaaaagctttgacattttatgttttattcataaagggggttaattatttgctacaaagaagcacgatctattttcatcatcgatttgaaaatatctgtaactcctatagatcctataggcagagagttttcctttctgactttttccctttgctttcgtgtgaccacatgttttctgtaccagtcactggggaaagaagtgagtttatctcgtttgttttaaaagttttgcttgtctatttagcattcctttttgggtctcaagatttatggaacaataaatgtcatttaatgctgtgtgcttattttgaattcctcatcaggttttagaagcggggtaaaaatacttagatgcttatcagacttgaaattatactgagtggcattgaacgtgagtttgtcccagtgaaacaggctaaataaattttggcaccagcaaatttgttactttgtttttttaatagtaggatgtacacatttcagtataataaatgttttctgattgttttgcaaangtgtgtctcatntaaaatcccagttcctgctactgtcacttcgtgtcatagaatcaaggngttnccctgtgtgtattctgagccagnctaaatgtagtaagaggttaggctcanagtttnttcccttttcagtttanntcctgaaagctgatgcancttagggatatgtggtaaatcccattaacctaactnacttancttacctaactnaacttatttccangactttaaaaagggatggcaagcc

SEQ ID NO: 518 - DNA, 1217 bp; single-stranded, linear
  immediate source library: LIVRFET02
  immediate source clone: 2048834
caagagcatgacttcggtgctggaacctgtgttggacctcangtacccagtcacctccatgttcactgggtctgcctttaaccgcagcatccatcgggtcttccaggataagcagattgaggacctgtggctgccttacttcaacgtgaccacagatatcaccgnctcagccatgcgagtccacaaagatggctccctgtggcggtacgtgcgcgccagcatgacgctgtcgggctacctgcccccgctgtgcgaccccaaggacgggcacctactcatggatggcggctacatcaacaatctgccagcggacatcgcccgcagcatgggtgccaaaacggtcatcgccattgacgtggggagccaggatgagacggacctcagcacctacggggacagcctgtccggctggtggctgctgtggaagcggctgaatccctgggctgacaaggtaaaggttccagacatggctgaaatccagtcccgcctggcctacgtgtcctgtgtgcggcagctagaggttgtcaagtccagctcctactgcgagtacctgcgcccgcccatcgactgcttcaagaccatggactttgggaagttcgaccagatctatgatgtgggctaccagtacgggaaggcggtgtttggaggctggagcccgtggcaacgtcattgagaaaatgctcacagaccggcggtctacagaccttaatgagagccgccgtgcagacgtgcttgccttcccaagctctggcttcactgacttggcagagattgtgtcccggattgagccccccacgagctatgtctctgatggctgtgctgacggagaggagtcagattgtctgacagagtatgaggaggacgccggacccgactgctcgagggatgaaggggggtcccccgagggcgcaagccccagcactgcctccgagatggaggaggagaagtcgattctccggcaacgacgctgtctgccccaggagccgcccggctcagccacagatgcctgaggacctcgacaggggtcaccccctccctcccacccctggactgggctgggggtggccccgtgggggtagctcactccccctcctgctgctatgcctgtgacccccgcggcccacacactggactgacctgccctgagcggggatgcagtgttgcactgatgacttgaccagcccctcccccaataaactcgcctcttggaaatggca

SEQ ID NO: 519 - DNA, 662 bp; single-stranded, linear
  immediate source library: MPHGNOT02
  immediate source clone: 205155
tgacttgatttaagggaaaaaatgactggctatattcagtcagatatggcaaaaagtctcaaggtgttaatgtgaatgattaaggtcttggggggggtgtcccctatcagactacaggtgtttagaggcacagaaaaaggtgcagttgggttcttaatgtgaaatgatgagaagcacaactccagtgtgtctctttgtgtagaatgtcagcagacaccccctgctagatgtgctggatcatgggaaagcatttccatttgttactagattgttcagaagttttaatttatnnnnnnnnnnnnnnnnnnnnnnnnnnnnnnnnnnnnnnnnnnnnnnnnnnnnnnnnnnnnnnnnnnnnnnnnnnnnnnnnnnnnnnnnnnnnnnnnnnnnnnnnnnnnnnnnnnnnnnnnnnnnnnnnnnnnnnnnnnnnnnnnnnnnnnntaggtactggatttatgcaaatgtcttttctgcgtcttttgagatgagtatcaggttttttttttttccttttatcatctgatgatgaacttaatgtttccatttgtattaatggaatactaagtccctctgtgaatttctgaaccaagctattcctaggcctgagttttattttgttgacacagaaataaattagaaggccaagcgtggtggcatgtgtt

SEQ ID NO: 520 - DNA, 504 bp; single-stranded, linear
  immediate source library: OVARNOT03
  immediate source clone: 2059533
cggctcgagggcggcgccatgctcagcgcccagagagcgcgcccaaatcgcgcaggtctgggacctgattgcgggccacgaggcgcaattcggggcggactggctgctcaggctcttcacggtgtaccccagcaccaaggtctactccccgcacctgagcgcctgccaggacgcgacgcagctgctgagccacgggcagcgcatgctggcggctgtgggcgcggcggtgcagcacgtggacaacctgcgcgccgcgctggagcccgctggcggacctgcacgcgctcgtgctgcgcttggacccagccaactttccgctgctaatccagtgtttccacgtcgtgctggcctcccacctgcaggacgagttcaccgtgcaaatgcaagcggcgtgggacaagttcctgactggtgtggccgtggtgctgaccgaaaaataccgctgagccctgtgctgcgcaggccttggtctgtgcctgtcaataaacagaggcccgaaccatc

SEQ ID NO: 521 - DNA, 741 bp; single-stranded, linear
  immediate source library: SPLNNOT02
  immediate source clone: 206130
ggagcctgggccatcccaggtgggcctcggggacagggcgccactcacagccacagccccacaactggatgatgaggagatgtactcagcccacatgcccgctcacctgcgctgtgatgcctgcagagctgtggcttaccagatgtggcaaaaatctggcaaaggcagagacccaaacttcatacctcaaactctggggggcggcgggagctgaggcgagttggtctacacggatgtcctggaccggagctgctcccggaactggcaggactacggagttcgagaagtggaccaagtgaaacgttctcacaggcccaggacttagcgaggggccagagccaagcatcagcgtgatggtcacagggggcccctggcctaccaggctctccaggacatgtttgcactacttgggggagtttggagaagaccagatctatgaagcccaccaacaaggccgaggggctctggagggcattgctatgtgggggaccccagggggcctgctcagagaaggtgtcagccacaagagaagagctctagtcctggactctaccctcctctgaaagaagcttggggcttgctctgacggtctccactcccgtctgcaggcagccaggagggcaggaagcccttgctctgtgctgccatcctgcctccctcctccagcctcagggcactcgggcctgggtgggagtcaacgccttcccctctggactcaaataaaacccagtgacctcaaaa

SEQ ID NO: 522 - DNA, 525 bp; single-stranded, linear
  immediate source library: OVARNOT03
  immediate source clone: 2062218
aggctttgacccctactctatgttcaccccagagcagatcatggggaaggatgtccggctcctacgcatcaagaaggagggatccttagacctggccctggaaggcggtgtggactcccccattgggaaggtggttgtttctgctgtgtatgagcggggagctgctgagcggcatggtggcattgtgaaaggggacgagatcatggcaatcaacggcaagattgtgacagactacaccctggctgaggctgaggctgccctgcagaaggcctggaatcagggcggggactggatcgaccttgtggttgccgtctgccccccaaaggagtatgacgatgagctgaccttcttctgaagtccaaaaggggaaaccaaattcaccgttaggaaacagtgagctccggccccacctcgtgaacacaaagcctcggaccagccttgagagaggccacactacacacaccagatggcatccttgggacctgantctatcacccaggnntctcaaantccctttgggcctta

SEQ ID NO: 523 - DNA, 745 bp; single-stranded, linear
  immediate source library: SPLNNOT02
  immediate source clone: 206465
gacgtcctgccccgagcctcagggcttctccgacccgcccggccagggccccaccgggaccttcaggtcctccccggcgccccactcagggccctgccccagcagactgtaccccacgacccagccccctgagcagggcttggatcccacccgcagctccctgccccgctccagcccggagaacctggtggaccagatcctggagtccgtggactcggattctgaagggattttcattgactttggccggggccggggctctggcatgtccgacttggagggctctgggggccggcagagtgtcgtgtgaggcctcacagctggccttgagtttttactgacacgtccctgtgtgcgggggtgtccatgtggcgtgtgtgtgagtgagacttttttactgcgtcccgtcccgccagccctgtcggcctcgtcactggccttggtcacttttgtatttctgtcttggttggaaataccatcagccttccttgctcggcccaggtctgtttcaggcatctaagtcggcgtttacccaggggccgggccagagacgggggtcggccgctcgctcccacgctcctcctgccccagccctctggtgtccacacctgcccacagagaatgtaaacccagtgggctctgcccacgccgggccccaaagtgaccagactccagcacacctgtctcctcctgcctggggtggccatggggatggaagggggtggaataaaacctgtcaacctgg

SEQ ID NO: 524 - DNA, 903 bp; single-stranded, linear
  immediate source library: SPLNNOT02
  immediate source clone: 206520
catggagctgttcctcgcgggccgccgggtgctggtcaccggggcaggcaaaggtgggcggcggggaaaggtgggcaaaggccggcggcgggcagaggcgggcaggggacgccttcactgagcccgctcccggcaggtatagggcgcggcacggtccaggcgctgcacgcgacgggcgcgcgggtggtggctgtgagccggactcaggcgggatcttgacagccttgtccgcgagtgcccggggatagaacccgtgtgcgtggacctgggtgactgggaggccaccgagcgggcgctgtggcagcgtgggccccgtggacctgctggtgaacaacgccgctgtcgccctgctgcagcccttcctggaggtcaccaaggaggcctttgacagatcctttgaggtgaacctgcgtgcggtcatccaggtgtcgcagattgtggccaggggcttaatagcccggggagtcccaggggccatcgtgaatgtctccagccagtgctcccagcgggcagtaactaaccatagcgtctactgctccaccaagggtgccctggacatgctgaccaaggtgatggccctagagctcgggccccacaagatccgagtgaatgcagtaaaccccacagtggtgatgacgtccatgggccaggccacctggagtgacccccacaaggccaagactatgctgaaccgaatcccacttggcaagtttgctgaggtagcagcacgtggtgaacgccatcctctttctgctgagtgaccgaagtggtcatgaccacgggttccactttgccggtggaagggggcttctgggcctgctgagctccctccacacacctcaagccccatgccgtgctcatcctacccccaatccctccaataaacctgattctgctgcccag

SEQ ID NO: 525 - DNA, 4059 bp; single-stranded, linear
  immediate source library: SPLNNOT02
  immediate source clone: 206587
ctcagtcttcctccagggaatggcctccatgaggggcagggccagcttccatcccttctccagcccttggggcaactgagcaatatacttaacctgaatctctactcacaacccccaccagctctgaatgtctaacctgctcccctgattcgtaaacctaggggaaaccatctctctcacctaatgacccgccttgttctgaagctttctctaagcccttcccagttgcttcctagcacattccattctttgtggcccagggcctggaccagaccattgtgatacctgaccccgcccacctgggagtgtggctttgggtttcatccttccccagcgtgggtctctacgtccctgtttcccttgtatcaagacaccttcctcagcttccatgcctttggatcttccatgttcctccccatattcctgagacttcggagatggcctctcccaagccaggtcaaggaggtttgggggagggttgcccctctgcccctctgttctgtggctgagcactttcccagtccagggcagggaaatattggccctatcttgacccccaaatccagtgagctccagattcttccaaggcaaaagaggtaagcagatcacacctctttctgcctctacatatggcctattctgggctagaccagatttgggggccaggagggaagaactccatatgggatggagaagggaatctactttctccctgtttttttttcctgatggtttctcccagactagaccaaatagccagaaaaatgataggggtcggatgggtgggtaagcccaggatttgcacatgaccttccatccttacctgtattcccatctccccagtgtcactcccctcaccaatcactccagatggttttgggggaaccattctactcttctggtgggctttggggtatccccaccaactttcccttcaaaatagcaccttacaccccatctttgactcagttccccacacccaaagatcccagcctagggatggggtacagggactttaaatagtccctaatccctaatttgcactagttaaccctggtcagggtccctgtatttccttccagtgggggagataaatgtttgctcctaattctctttgaaaactgggcctccctgctctgtgattggataaatatttcccatcccacccacctccccccaaaaaatagctcacaaggggagagccagtatgggggagcaaatttgacaaatgggaattagaggagtgcagttttaaaaggaaaagttgctgtcatcaaaatggcagccttttccccagctactgtttttggggccaagatggctgccctagcagcaatcactgccaagggcaagatcatggcttttggagggaggtgagtttagggagggccaggaccatcctcctacccctcataccctcccagcatatacaaaaggggaggttttagacaggctccctgaatgttaaccacagaggagtcactccttcattcctcctctgtctctttgcacttttcttggtcttggccacagcctgagtgacgaatttcctactgaatgtaccaagttccaatttttaagggggggaaaggtttcaaatggggaaaaacacacaaaaaaaaaatcactaaaaattcccacaaatcttgtttctggcactttagaaaaactgcaaaaaaatacgtaataaagaatacatatatatatatctncacacaaatnnnnnnnnnnnnnnnnnnnacagcggaaccacaagagagactgaggaaggcctggaggcaggggcagaggtgacgacagtgcccctatatccttaacccatactcctctgaggcaaacaggcatgggaaaatggaagggttgaggatggaccggagaattggaacttcagaataggtcaaaattccaaaaccatggacattttttttttgggagaattgagattgtagacattttttttttctcttaagtatgatcaaggaaaatagcttccagaatgtggtggttctgggcaaacaaaatgagattgtggcgacgtggagattaaaatatatgtatttgagctggggaatttgaatattgtgagtttcagatgttggaaatttgggattttgcagttttgtcttttgaaaatgatcaagtcttgtcagttcgtgccctctttccccatgttccctgggaagacgggtggtggcagagtgagaaggccactggttctgtgccgcagcacgcaaaatttagaattctacagactagctctatacgtagtgaggacccagatttagagaaactgaccaatatttatctccgcatttgtgtgtgtgtccaactctgtaggccaataaaccaacaagacaaatgcggagataaatattggtcagtntntntaantctcggctcgagccgacgggctccgagcgcggcccctgggttcgaacacggcacccgcactgcgcgtcatggtgcaggcctggtatatggacgacgccccgggcgacccgcggcaacccccaccgccccgaccccggccgcccagtgggcctggagcagctgcggcggctcggggtgctctactggaagctggatgctgacaaatatgagaatgatccagaattagaaaagatccgaagagagaggaactactcctgggatggacatcataaccatatgcaaagataaactaccaaattatgaagaaaagattaagaatgttctacgaggagcatttgcacttggacgatgagatccgctacatcctgggatggcagtgggtacttcgacgtgagggacaagggaggaccagtggatccggatcttcatggagaagggagacatggtgacgctccccgcggggatctatcaccgcttccacggtggacgagaagaacttacacgaaggccatgcggctgtttgtgggaaaaccggtgttgacagcgtacaaccggcccgctgaccattttgaagcccgcgggcagtacgttgaaatttctggcacagaccgcctagcagtgctgcctgggaactaacacgtgcctcgtaaaggtccccaattgtaatgactgagcagaaaatcaatcactttctctttgcttttagaggatagccttgaggctagattatctttcctttgtaagattatttgatcagaatattttgtaatgaaaggatctagaaagcaacttggaagtgtaaagagtcaccttcattttctgtaactcaatcaagactggtgggtccatggccctgtgttagttcatgcattcagttgagtcccaaatgaaagtttcatctcccgaaatgcagttccttagatgcccatctggacgtgatgccgcgcctgccgtgtaagaaggtgcaatcctagataacacagctagccagatagaagacactttttttctccaaaatgatgccttggggtggggagtggtagggggaagagctcccaccctaaggggcacacactgagttgcttatgccacttccttgttcaaaataaagtaactgccttaatcttatactcatggcttggagttaccttatattcaggtatatgtggatattttgcctggtttgttaaaattgccccatttagattccttctataattgttcttatagatcaagtaatttatatatgagctgtgttagtattttttcagtgtgagatctctggattctttcacaataaagctgttgaattttaacaggagtattagtacataaattttctactcaacaattccgagataggattatgcctagtttgtcatatcacagaaaaactccaagttaacttcatgttttggaagggcaggtcgtttttaaagtatttctttttttaactggatgaaaaatcttcatgttaggattaattttcttaatcacctccacactgtacagaggaaactcaagccttaaatgtttaagtaaactctgtctcagttttaggattaaaatacccaccggtggtgtgatgatgccatataccgcagggcttgcttctgtcaagtgtgactctatctcagtaattaaaataagtgctgatctaaaanaaaa

SEQ ID NO: 526 - DNA, 1187 bp; single-stranded, linear
  immediate source library: SPLNNOT02
  immediate source clone: 206638
gaggaggagctgctttccccatcatctggaaggtgacagaaatgggctgggaaggtccgaacagcagggtggatgatacgttttgggcaagttggagagcctttgcccagattggcccagcaaggagcggttttagattagagacactggctggattgaggagtagaaggctcaaacaacccaaggttagttggtctttgtgtgacagtgggaagaagtggagagaacactctgtctccccgacttccttcttgaccctccttccgtatctttcattcttccccactggcctttccagatgaggtccaaaagtaagctcactcttcagggaaaagtgatactaaacccaggcgtgaggagtcatccttctgctcttacttttccctgcatttccttaggctggcccagactctagattcctgggcacttacctgtatctgagacccttagacctcctcaaatagagctggaagcatttttcccttagcaaaccataacagaaaaaaataagacccaatattggcaaagagactactgaaaaaacattcccatacattgcgtgtgggagtatacatcggtgcaggcttcctggatgacagttgggtgatatgtgtcatgtggcctaaaagcctccatgtcatttgacctacgaattctatctttgggaatttatcctaagaaaatacttaaggatttagttagtgataagatgttcatcccagcattgcaatggagaaaaatgggaagcaatggtttggttgggaatttattccttttctgctgtaacgaaagtttgcaataggggattgcttaagtaaattattgtatctccatccagatggtggagtaccgcgcagacattaaaagtcatgtaaaagaacatctgactgaaagaaaaatgctccttgaatattaaaaggttgtaaaaatagtgcatgttatgtgatttcaattttgttttttaaaatatgggtgtatgcttgtatacgtagagcagataaaaaagacggaaggcatactaaaaaatgttgagtggttatctttgtatggtggaacaaagtcactgtaattttcatctttggtttttctgtaatttccaaattttccacattttgtatttcatataataaatataatttaagaaaaaaanaaaaaaaaanctcgggggggggcccggnnccnatttt

SEQ ID NO: 527 - DNA, 877 bp; single-stranded, linear
  immediate source library: SPLNNOT02
  immediate source clone: 207052
gtccgcgcgtgcgcaccccgcgcgcgcctctctgtcgtggcgcggcttcccgcggtacttctctgcaaatgggctccgtggcctagcgcccccgtccccgccacccgtgaatcgtgcgccgaggcccgcgaggggttcgccgcccagatccacaccagccagcaagctaaagcatggcggccatcccctccagcggcttgcttcgtggccacccacggactactaccggcgccgcctgggttccacttccagcaacagctcctgcagcagtaccgagtgccccggggaagccattccccaccccccaggtctccccaaggctgacccgggtcattggtgggccagcttctttttcgggaagtccaccctcccgttcatggccacggtgttggagtccgcagagcactcggaaccttcccagggcttcagcagcatgaccgcctgtggcctggctcgggacgccccgaggaagcagcccggcggtcagtccagcacagccagcgctgggcccccgtcctgacctgagcggttaccaccagccccaggcctgcggaggcgctagtccaccagagcccctnccngcccctttccccattccgcattcctngcccccctcccaacctnccaccccccaccctgtaaactaggcggctgcagcaagcagaccttcgcatcaacacagcagacaccaaaaaccagtgagagccccgctctctaccgcccggccccagcactcgctagctttcctgacacctggaactgtgcacctggcaccaagcggaaaataaactccaagcagccagtaaaaaaaaanaanaaanaaanaaaannanaaanaaannannnnagaaaaaanttnaggaaaaaaaangggggg

SEQ ID NO: 528 - DNA, 1629 bp; single-stranded, linear
  immediate source library: SPLNNOT02
  immediate source clone: 207681
gcgggacattgtgcccaccctgagggccgcgatggctgccgcccagtcgggcaccccaggtccggtgtttgtggaactgcccgttgacgtgctttacccctacttcatggtccagaaggagatggtgccagccaagccacccaagggcctcgtgggccgagtggtctcctggtatttagagaattacctgggccaacctctttgcaggagcctgggagcctcagcccgagggaccgctgccccctggacatcccccaggcttccccgcagcaggttcagcgctgtgtggagatcctgagccgggccaagaggcctctgatggtgctggggagtcaggccctgctcaccccaacgtctgccgacaagcttcgggctgccgtggagaccttgggtgttccctgcttccttggagggatggcacgggggctgttaggccgcaaccaccccctccacatccgggagaaccgcagtgcggccctgaagaaggcggatgtcattgtcctagcaggaactgtgtgtgacttccgcctatcctatggccgtgtcctcagccacagcagcaagatcatcatcgtcaatcgtaatcgggaagagatgttgctcaactcagacatcttctggaagccccaggaggctgtgcagggagatgtgggttccttcgtgctgaagttagtggagggccttcagggccagacctgggccccagactgggtggaggagctgcgggaagccgaccggcagaaggagcagacctttcgggagaaggcagcgatgcctgtggcccagcaactgaacccagtgcaggtgctgcagctggtggaggaaacgctacctgacaactcaattctggtggtggatggtggggacttcgtgggcactgctgcccatctggtacagccccgcggccccctgcgctggcttgatcctggggcctttgggactctgggagttggtgcaggatttgcacttggggccaagctgtgccggccagatgctgaggtctggtgcctgtttggggacggagcttttggctacagcctcatcgaatttgatacattcgtcagacacaagatcccagtgatggccttggtagggaatgatgctggctggacacagatttctcgggagcaggtgccctctctgggcagcaacgtggcctgtggcctggcctacactgattatcacaaggcagccatgggtctgggggcccggggcttgctgctctcacgggagaacgaggatcaggtggtcaaggtgctgcacgatgcccagcagcagtgccgagacggccacccggttgtggtcaacatcctcattgggaggacggacttccgcgatggctccattgctgtatagggccttgtgggtcaggacgcttggctgccttcctgcccctgggactgtgtccagctggtttggagtctcatcattgcttgccctgggcctatcccatgaggcccagtgactccacaacctccctgaggaggggatggaggggtcaaatctcagagaggctctcttgtgagctcttggaccctcctcttcacggacccaactgtgccgtttgtcccctctcttatggagactgaataaaccacctctggcccatgtaggcccaagtaaaaaaaa

SEQ ID NO: 529 - DNA, 229 bp; single-stranded, linear
  immediate source library: ISLTNOT01
  immediate source clone: 2079250
ggatttgactctcagttcagagaccggggactactgtgtgcgaaagggagacttggtagccatctttcctccagtcctacatggtgaccctgaaatctttgaagctccagaggaatatgttggataacagaagatttgattacaaaaganaattatttggaaaataattttgctctctgaatatctcctcatctccatttcttgcccccgtacacatatattcttatca

SEQ ID NO: 530 - DNA, 872 bp; single-stranded, linear
  immediate source library: BRAITUT02
  immediate source clone: 2100016
agacgttctgccgggtggcagtcccagcggagtttgcgtgtgcgggcgggaccggatttcgtccgtgggcccgggggcggcgggggccggggagtgaggggccggctgagcccacctcgctgggccctccctggcgccccgccttgggcggcggcgagcgcgcgggccgccatgtcgtacatgctcccgcacctgcacaacggctggcaggtggaccaggccatcctctcggaggaggaccgcgtggtcgtcatccgcttcggccacgactgggatcctacgtgcatgaagatggacgaggtcctgtacagcatcgccgagaaggttaaaaattttgcagttatttatcttgtggatattacagaagtgcctgacttcaacaaaatgtatgagttatacgatccatgtactgtcatgtttttcttcaggaacaagcacatcatgattgacttggggactggcaacaacaacaaggattaactgggccatggaggacaagcaggagatggtggacatcatcgagacggtgtaccgcggggcccgcaaaggccgcggcctggtggtgtcccccaaggactactccaccaagtacccgctactgaggcgccctcagtctgcgcggataaatgtcgtggagccctttttgtatggaaacgttttaagctatttaaagcctttggaaaatacaggaagcttccagggctggagcacctctgagatggaattgataacatggtcttaactcaccgaaataaacaagcacgtggtgagaggagcaggcctacttgtttgttctcaggaaacttaatgaatagattactgattttcctagtcaaagttaattcttacccttggggtaaanngagggtttt

SEQ ID NO: 531 - DNA, 1766 bp; single-stranded, linear
  immediate source library: SPLNNOT02
  immediate source clone: 212088
cttcaacaatgtcatgaccctatgtgccatgctgcccctgctgttattcacctacctcaactccttcctgcatcagaggatcccccagtccgtacggatcctgggcagcctggtggccatcctgctggtgtttctgatcactgccatcctggtgaaggtgcagctggatgctctgcccttctttgtcatcaccatgatcaagatcgtgctcattaattcatttggtgccatcctgcagggcagcctgtttggtctggctggccttctgcctgccagctacacggcccccatcatgagtggccagggcctagcaggcttctttgcctccgtggccatgatctgcgctattgccagtggctcggagtatcagaaagtgccttcggctactttatcacagcctgtgctgttatcattttgaccatcatctgttacctgggcctgccccgcctggaattctaccgctactaccagcagctcaagcttgaaggacccggggagcaggagaccaagttggacctcattagcaaaggagaggagccaagagcaggcaaagaggaatctggagtttcagtctccaactctcagcccaccaatgaaagccactctatcaaagccatcctgaaaaatatctcagtcctggctttctctgtctgcttcatcttcactatcaccattgggatgtttccagccgtgactgttgaggtcaagtccagcatcgcaggcagcagcacctgggaacgttacttcattcctgtgtcctgtttcttgactttcaatatctttgactggttgggccggagcctcacagctgtattcatgtggcctgggaaggacagccgctggctgccaagcctggtgctggcccggctggtgtttgtgccactgctgctgctgtgcaacattaagccccgccgctacctgactgtggtcttcgagcacgatgcctggttcatcttcttcatggctgcctttgccttctccaacggctacctcgccagcctctgcatgtgcttcgggcccaagaaagtgaagccagctgaggcagagaccgcaggagccatcatggccttcttcctgtgtctgggtctggcactgggggctgttttctccttcctgttccgggcaattgtgtgacaaaggatggacagaaggactgcctgcctccctccctgtctgcctcctgccccttccttctgccaggggtgatcctgagtggtctggcggttttttcttctaactgacttctgctttccacggcgtgtgctgggcccggatctccaggccctggggagggagcctctggacggacagtggggacattgtgggtttggggctcagagtcgagggacggggtgtagcctcggcatttgcttgagtttctccactcttggctctgactgatccctgcttgtgcaggccagtggaggctcttgggcttggagaacacgtgtgtctctgtgtatgtgtctgtntgtctgcgtccgtgtctgtcagactgtctgactgtcctggggtggctaggagctgggtctgaccgttgtatggtttgacctgatatactccattctcccctgcgcctcctcctctgtgttctctccatgtccccctcccaactccccatgcccagttcttacccatcatgcaccctgtacagttgccacgttactgccttttttaaaaatatatttgacagaaaccaggtgccttcagaggctctctgatttaaataaacctttcttgtttttttctccatggcaaaaaaaaaa

SEQ ID NO: 532 - DNA, 479 bp; single-stranded, linear
  immediate source library: KIDNNOT05
  immediate source clone: 2130869
atgtgtatccacatgtgtgcatacactcttaagttgggtgggaagtggattccttgttggtttctggttcagagtgctctcccaccaccagagacaagtgggtaaaaaggtcagtccattgcaggaatanatatccgggagagctaggtcccttggggctctggatgctgggtaacccagaggtaatgtgggtaccctttctgaagctgtcagggctgtgactagcacccttatcacccctcactgccttgtgggaatagtagagggtttttttcctccagaccccctggcctttcagttcttaactatttccctccaggccagaaagttttctttgaggaaggagaggagagggtggcaatgatgcctttgatctggaattggacatttctctgtcagagcacagaggaggctcatatcacctcttccctctcctacttggcccagctgcttggaggaccgaccccatggctgagaat

SEQ ID NO: 533 - DNA, 849 bp; single-stranded, linear
  immediate source library: SPLNNOT02
  immediate source clone: 213940
ctccccaggccacccaacttgggcacctccctgggcccagaactgccttccattcaatggggaacccttctatccccaagaaccccttccctgcttgcaccctgggagagaacagcttgactcccatcaactcaacgctggtggaaagacagggaccgaaccctgggntcaggcctggtcattgcctcctcagcactccctcctgggaggccttagctctagagtgaggggtgggtggaacctgggggcacctcgttcaccctgtccccactgcccacagttttaggatctaaatgattgcctctggaactattcttctagactatcccacatcagaatcactgggaaatttaagtttgcagatcccacactcaccctgaatcctcactcagggtggggtcaggaatctgcattttaactagtcgcggggattgtggggggcagtagctggctgtttcgtggcatttctgtggctctgcagtgttcctccaccccaggacccaatatgttcaggccacaccgatggcctgaaccccatgggtagagtcacttaggggccacttcctaagttgctgtccagcctcagtgaccccctagtgcttcctggagctgaggctgtgggcggctgtcccagcaaccatgcgaggggttgccccagttgctcatacaaacagatcagcatgaggacagaaggcaggagactttggtcagttacctgggaattctgggctgccaggaaacgatttgggcctctgtcagtttcttttccatgtatgaggagggggaaatttgtatattagaaacttattcatcccactcaggacaataaaaacgaatgtacaaaaagcc

SEQ ID NO: 534 - DNA, 1925 bp; single-stranded, linear
  immediate source library: STOMNOT01
  immediate source clone: 215150
ccgtcggggtcggggtccggcgcacctgctggcgggcccgggagatccagtccccaggacgaggtgccaggtgcctggcccatgttgcagggggccgtggagccccatgcagatcgacgtggacccccaggaagacccgcagaatgcacctgacgtcaactacgtggtggagaaccccagcctggatctggaacagtacgcggccagctacagcggcctgatgcgcatcgaacggctgcagttcattgctgatcactgccccacgctgcgggtggaggccctgaagatggccctctccttcgtgcagagaacctttaacgtggacatgtacgaggagatccaccgcaagctctcagaggccaccaggtcctctctcagggagctgcagaacgcacccgacgccatccctgagagcggcgtggagcccccagccctggacacggcctgggtggaggccacgcggaagaaggcgctgctgaagctggagaagctggacacagacctgaagaactacaagggcaactccatcaaagagagcatccggcgcggccacgacgacctgggcgaccactacctggactgtggggacctcagcaacgccctcaagtgctattcccgggcccgggactactgcaccagcgccaaacacgtcatcaacatgtgcctcaatgtcatcaaggtcagcgtctacttgcagaattggtctcatgtgctcagctacgtcagcaaggctgagtccaccccagagattgccgagcagcgaggagagcgtgacagccagacccaggccatcctcaccaagctcaagtgtgccgcaggttnggcagagctggccgccaggaagtacaagcaggctgccaagtgcctcctgctggcttcctttgatcactgtgacttccctgagctgctgtcccccagcaacgtggccatgtacggtggcctgtgcgccttggctacctttgaccggcaggagctgcagcgcaatgtcatctccagcagctccttcaagttgttcttggagctggagccacaggtccgagacatcatcttcaaattctacgaagtccaagtacgcctcatgtctcaagatgctggacgagatgaaggacaacctgctcctggacatgtatctggccccccatgtcaggaccctgtacacccagattcgcaaccgtgccctcatccagtatttcagcccctacgtgtcagccgacatgcataggatggcggcagctttcaataccacggtggccgccctggaggacgagctgacgcagctaatcctggaggggctgatcagtgcccgtgtggactcacacagcaagatcctatacgcccgggacgtggatcagcgcagacgcanctttgaaaagtctctgttgatgggcaaggagttccagcgccgcgccaaggccatgatgctgcgggcagctgtgctccgcaaccagatccatgtcaagtccccgcccagagaagggagccagggggagctgactccagccaacagccagtcccggatgagcaccaacatgtgaggggtgaaccttggcctccaggacatctgcaccccctccccacctccacggacctcggacctccaggcggctcagtgctgcctgcggcccagctaaggggcctggccactgggtgccacccagcctgtgtgccctccctggggctgaggaggcaggcggctgctagttgtggcccttcctggaaggagaggcctgcagggctcgaccctgtgggtttctgtccccagggagcagactgtgcggcacccaggcccagtggcaccatttcccagacccctcctgttcccgcctcagtcaggtgcagacaagtgggcggtgtccattaaagagcagactcagcgttaaaaanaanaaaaaaaanannaagagaaaaaannaaaagananaaag

SEQ ID NO: 535 - DNA, 1400 bp; single-stranded, linear
  immediate source library: ENDCNOT02
  immediate source clone: 2160348
cccagaggatcacggggctgcgagcactggcagggctggtctacaacggctcgggctccgagcactgctacgacatctaccggctctancacagctgtgctgaccccactggctgcggcaacggncccgacggcangggcttgggactaacagggctntaacgagatcaacctganctttggcagcaacaatgtgaccgatatgtttcccgacttncctttaatgangggttcggcanaggtantnctggggaaatngggcttnggcccngccgactgntgttaacaactggggccgggtggggcgaggatccgcagcccggccaggggctttgcctcctgccccagggctgtggtggggtggacagcacgaccttcccagaaaccctgggggaggcaggggccgtccctggggaccctctcagcactggctgtagccaggcccagcttggtgggtgctgcccaaggggcccctggggtccccagcatggagggcaacagagggcagcaggccccaccctgccccgtggagagcgggggggccctcaacagtcaggcccggggctggcagcacagacaccgccgacctccaagcaggtagcctggagggccttcctcactgggacctacagatcccagagccccagatcccctgcaggaccattccgaggggggacaggttggtggccggagcccgcggtgtgtctgtgtgtggccgctgggccccagcgcctctcctccccagggctggtctacaacgcctcgggctccgagcactgctacgacatctaccggctctaccacagctgtgctgaccccactggctgcggcaccggccccgacgccagggcctgggactaccaggcctgcaccgagatcaacctgaccttcgccagcaacaatgtgaccgatatgttcccggacctgcccttcactgacgagctccgccagcggtactgcctggacacctggggcgtgtggccccggcccgactggctgctgaccagcttctgggggggtgatctcagagccgccagcaacatcatcttctccaacgggaacctggacccctgggcagggggcgggattcggaggaacctgagtgcctcagtcatcgccgtcaccatccaggggggagcgcaccacctcgacctcagagcctcccacccagaagatcctgcttccgtggttgaagcgcggaagctggaggccaccatcatcggcgagtgggtaaaggcagccaggcgtgagcagcagccagctctgcgtggggggcccagactcagcctctgagcacaggactggaggggtctcaaggctcctcatggagtgggggcttcactcaagcagctggcggcagagggaaggggctgaataaacgcctggaggcctggccatgta

SEQ ID NO: 536 - DNA, 1653 bp; single-stranded, linear
  immediate source library: STOMNOT01
  immediate source clone: 216982
ctgtcttccaggttctgtcctcacaagggtctgtcttcatccaaggtcgtcacaggggaccaagagctccagcctcaggcagggcaggagctcctactcaattgggaaaaatgctctgaaatgtcagggactcattcagagtcacagagccaagcagtggcaagactgggattgaaaccccggccctgaggtttctttgcacccaccaaccctaccctgctcctgtgtctgcctctgtgtgctccccaccccgtctccacaccaacccctggggtcgaggctgggttggggaatgctctcgctgctccttggggccatgttctgccgcctgccatgtctgcttcctatggttgatgcctcaggggagctggaggctcccacctgagaaggacttgctgaatgccctcctgaccccaacccaccttaccccagttttaagaagaggagaggtcactcaattgggggagcccctgagcagcgataccagatcatccctgtgtctgtggctgcccgacttctacccgggctcaggatgtgctggatgcccanctctctgaggtcaatgctgttcgttttggccccaacagcagcctcctggccactggaggggctgaccgcctgatccacctctggaatgttgtgggaagtcgcctggaggccaaccagaccctggagggagctggtggcagcatcaccagtgtggactttgacccctcgggctaccaggttttagcagcaacttacaaccaggctgcccagctctggaaggtgggggaggcacagtccaaggagacactgtctggacacaaggataaggtgacagctgccaaattcaagctaacgaggcaccaggcagtgactgggagccgcgaccggacagtgaaggagtgggacctcggccgtgcctattgctccaggaccatcaatgtcctttcctactgtaatgacgtggtgtgtggggaccatatcatcattagtggccacaatgaccagaagatccggttctgggacagcagggggccccactgcacccaggtcatccctgtgcagggccgggtcacctccctgagcctcagccacgaccaaactgcacctgctcagctgttcccgagacaacacactcaaggtcatcgacctgcgtgtcagcaacatccgccaggtgttcagggccgatggcttcaagtgtggttctgactggaccaaagctgtgttcagcccggacagaagctatgcactggcaggctcctgtgatggggccctttacatctgggatgtggacaccgggaaactggagagcagactacagggaccccattgcgctgccgtcaacgccgtggcctggtgctactccgggagccacatggtgagcgtggaccagggcaggaaggttgtgctctggcagtagggccacgacctgcctgcctgggctggagctcttgcccgaagcctgaagcttccttcggcgccatgcaggggttggggttgggactggagctggccttgggatttaatggggaagaaggcctggcaggacctggcctgtttgtttaaaaatgaagtatgggttgggggattacgctagtttttctttgtatttttatctctatctatctcctcactttttctcccaaagtagaaaaaaatgatatctga

SEQ ID NO: 537 - DNA, 940 bp; single-stranded, linear
  immediate source library: STOMNOT01
  immediate source clone: 216991
gaaggccacggttcaggcccccggacccccaggcttgctggacgggacggcagacgatgccacgacggtggacacactcctggcctccaagtcgtcctgcgccggcctcctgtgccgcaccctggctcacctggaggagctgcagccgctgccccagcgcccttcaccgtggccccaggcgtctctactgggggctacagtgactgtcctgcggctctgtgacggctcggctgcccctgcctccagtgtggggggccacctctgtgggaccctggcgggctgcgtccgggtccagcgagcagccctcgacttcctggggacgctgtcacaggggacaggcccccaggagctggtgacgcaggcgcttgctgtcctcctggagtgcctcgagagccccggctccagccccacggttctgaagaaggccttccaggccacgctcaggtggctcctgagctcacccaagacccccggctgctctgatctcggccccctcatcccgcagttcctcagagagctgttccctgtgctgcagaaacgcctgtgccacccctgctgggaggtgagggactccgccctcgagttcctgacccagctgagcaggcactggggaggacaggctgacttcagatgcgcactcttggcttcagaggtgcctcagctggccctgcagctcctccaggaccctgagagttatgtccgagcgagtgcagtgaccgccatggggcagctgtccagccagggcctgcacgcccccaccagccctgagcatgcagaggcccggcagagcctgttcctggagctcctgcacatcctctccgtagactcggagggcttcccacggcgggcggtcatgcaagtcttcactgagtggctgcgggacggccacgccgacgcggcccaggacacggagcagttcgtggccactgtgctgcaggcg

SEQ ID NO: 538 - DNA, 1259 bp; single-stranded, linear
  immediate source library: ADENINB01
  immediate source clone: 21786
tctcaactctctcccttaagcactggggatcaggatgatgactttgagttcactggcagccacctgacagtaaggaatggctactcgtgtgtgcctgtggctttagcagaaggcctagacattaaactgaatacagcagtgcgacaggttcgctacacggcttcaggatgtgaagtgatagctgtgaatacccgctccacgagtcaaacctttatttataaatgcgacgcagttctctgtacccttcccctgggtgtgctgaagcagcagccaccagccgttcagtttgtgccacctctccctgagtggaaaacatctgcagtccaaaggatgggatttggcaaccttaacaaggtggtgttgtgttttgatcgggtgttctgggatccaagtgtcaatttgttcgggcatgttggcagtacgactgccagcaggggtgagctcttcctcttctggaacctctataaagctccaatactgttggcactagtggcaggagaagctgctggtatcatggaaaacataagtgacgatgtgattgttggccgatgcctggccattctcaaagggatttttggtagcagtgcagtacctcagcccaaagaaactgtggtgtctcgttggcgtgctgatccctgggctcggggctcttattcctatgttgctgcaggatcatctggaaatgactatgatttaatggctcagccaatcactcctggcccctcgattccaggtgccccacagccgattccacgactcttctttgcgggagaacatacgatccgtaactacccagccacagtgcatggtgctctgctgagtgggctgcgagaagcgggaagaatttcagaccagttttttggggggccatgtatacgctgcctcgccaggccacaccaggtgttcctgcacagcagtccccaagcatgtgagacagatgcattctaagggaagaggcccatgtgcctgtttctgccatgtaaggaaggctcttctagcaatactagatcccactgagaaaatccaccctggcatctgggctcctgatcagctgatggagctcctgatttgacaaaggagcttgcctcctttgaatgacctagagcacagggaggaacttgtccattagtttggaattgtgttcttcgtaaagactgaggcaagcaagtgctgtgaaataacatcatcttagtcccttggtgtgtggggtttttgttttttttttatattttgagaataaaacttcatataaaattggc

SEQ ID NO: 539 - DNA, 1510 bp; single-stranded, linear
  immediate source library: PROSNOT26
  immediate source clone: 2186852
ccggcgggtgctgctgcagctggaactgcggctgggctatgacgactacgtgcaggtatacgagggcctgggcgagcgcggggaccgcctgctgcagacgctgtcctaccgcagcaaccaccggcccgtgagcctggaggccgcccagggccgcctcaccgtggcctaccacgcgcgcgcccgcagcgccggccacggttcaatgccacctaccaggtgaagggctattgcctcccctgggagcagccgtgcgggagcagtagtgacagtgacgggggcagcctgggcgaccagggctgcttctcagagccacagcgctgtgatggctggtggcattgtgccagcggccgagacgagcagggctgccctgcctgcccgcccgaccagtacccctgcgagggtggcagtggtctgtgctacaaggctgccgaccgctgcaacaaccagaaaagctgtcccgacggcgccgacgagaagaactgcttcttctgccagcccggcaccttccactgcggtaccaacctgtgcatcttggagacgtggcgctgtgacggccaggaagactgccaggacggcagcgatgagcatgggtgcctggccgccgtgccccgcaaggtcatcacggcggcgctcattggcagcctggtgtgtggcctgctgctggtcatcgcgctgggctgcgccttcaagctctactcactgcgcacgcaggaatacagggccttcgagacccagatgacgcgcctggaggctgagttcgtgcggcgggaggcacccccatcctatggtcagctcatcgcccagggcctcattccacccgtggaggactttcctgtctacagtgcgtcccaggcctctgtgctgcagaatcttcgcacagccatgcggagacagatgcgtcggcacgcctcccgccgggggacctcccgccggcggctcggccgcctctggaaccggctctttcaccggccgcgggcgccccgaggccagatcccactgctgaccgcagcacgcccctcacagaccgtgctgggcgatggcttcctccagcctgctccaggggctgcccccgaccccccagcaccgctcatggacacaggcagcaccagggcggccggagacaggccccccagtgcccccggccgtgcaccggaggtgggaccttcagggccacccttgccctcgggcctgcgagacccagagtgcaggcccgtggacaaggacagaaaggtctgcagggagccactggcagacggcccagctcctgcagatgcacctcgggagccctgctcagcccaggacccgcacccccaggtctccactgccagcagcaccctgggcccccactcgccagagccactgggggtctgcaggaaccccccgcccccctgctccccaatgctggaggccagcgatgatgaggccctgttggtctgttgaccgctgggctcgctggtgaccgccacagccccgctttgtaaccagggaatacacagtcatttctaccctg

SEQ ID NO: 540 - DNA, 1076 bp; single-stranded, linear
  immediate source library: THYRTUT03
  immediate source clone: 2192167
ggctcagttccgccatggcctccttggaagtcagtcgtagtcctcgcaggtctcggcgggagctggaagtgcgcagtccacgacagaacaaatattcggtgcttttacctacctacaacgagcgcgagaacctgccgctcatcgtgtggctgctggtgaaaagcttctccgagagtggaatcaactatgaaattataatcatagatgatggaagcccagattggaacaagggatgttgctgaacagttggagaagatctatgggtcagacagaattcttctaagaccacgagagaaaaagttgggactaggaactgcatatattcatggaatgaaacatgccacaggaaactacatcattattatggatgctgatctctcacaccatccaaaatttattcctgaatttattaggaagcaaaaggagggtaattttgatattgtctctggaactcgctacaaaggaaatggaggtgtatatggctgggatttgaaaagaaaaataatcagccgtggggccaattttttaactcagatcttgctgagaccaggagcatctgatttaacaggaagtttcagattataccgaaaagaagttctagagaaattaatagaaaaatgtgtttctaaaggctacgtcttccagatggagatgattgttcgggcaagacagttgaattatactattggcgaggttccaatatcatttgtggatcgtgtttatggtgaatccaagttgggaggaaatgaaatagtatctttcttgaaaggattattgactctttttgctactacataaaagaaagatactcatttatagttacgttcatttcaggttaaaccatgaaagaagcctggttactgatttgtataaaatgtactcttaaagtataaaatataaggtaaggtaaatttcatgcatctttttatgaagaccacctattttatatttcaaattaaataattttaaagttgctggcctaatgagcaatgttctcaattttcgttttcattttgctgtattgagacctataaataaatgtatatttttttagtgcataaagtattgctgccttc

SEQ ID NO: 541 - DNA, 1383 bp; single-stranded, linear
  immediate source library: SPLNFET02
  immediate source clone: 2198554
cggctcgagaggcctccgagtggactccagtgagggaaaatgcagcaacaaaaataaagaacagtttcccgtgccaaaatcctgaatattcatttcgcccctgagcactgggttgaagacgcgaaattgggactgttggtctgcgacgagctgctgcatttgtatttcagaaagcctgaaaagctatcatggcagcaaggcccaagctccactatcccaacggaagaggccggatggagtccgtgagatgggttttagctgccgccggagtcgagtttgatgaagaatttctggaaacaaaagaacagttgtacaagttgcaggatggtaaccacctgctgttccaacaagtgcccatggttgaaattgacgggatgaagttggtacagacccgaagcattctccactacatagcagacaagcacaatctctttggcaagaacctcaaggagagaaccctgattgacatgtacgtggaggggacactggatctgctggaactgcttatcatgcatcctttcttaaaaccagatgatcagcaaaaggaagtggttaacatggcccagaaggctataattagatactttcctgtgtttgaaaagattttaaggggtcacggacaaagctttcttgttggtaatcagctgagccttgcagatgtgattttactccaaaccattttagctctagaagagaaaattcctaatatcctgtctgcatttcctttcctccaggaatacacagtgaaactaagtaatatccctacaattaagagattccttgaacctggcagcaagaagaagcctccccctgatgaaatttatgtgagaaccgtctacaacatctttaggccataaaacaacacatccatgtgtgagtgacagtgtgttcctagagatggtattgtctacagtcatgtcttaatggatcccagctctgtcatggtgctatctatgtattaagttgggtcctaagttgggtcttttgtgtcaaagagatcatctcttctagaaatatcaaccttttttgtccagtaaataattgttaggggatctttattggaaaacttttttggagaggctggtatttaagttagatctgattgggctactcatgtcctgtagccagttcatcctcataataagaatgggcaggatctcttgttctctcctgagtgtctttctactctcctgagcgtctttctgctctccttatcctgttctcttatccttatcccctccagtctctgcctaatttttagtgtttaataacaaccgaatgtctagtcaaatgaactctcctctgnagactgtaataaataaaatggtagtaatgaatgcaatcagtgttagccaaaataaagaatttatgagtcattgaaaa

SEQ ID NO: 542 - DNA, 1675 bp; single-stranded, linear
  immediate source library: SPLNFET02
  immediate source clone: 2203436
ttttcctttgaaggtcctgagattgtggactgtgacgggtgtactattgactggaagaaaggaaagaatgttactgtcaaaaccatccaagaaaaagcagaagcattaaggggtcgaggcactgttagaacaattacgaaacaagtacccaatgagtcctttttcaacttcttcaatccattgaaagcatccggggatggagaatcactggatgaagattctgaattcacattagcctctgattttgaaattggacactttttccgtgagcggatagtcccgcgggctgtgctgtacttcactggggaggccatagaagatgatgacaattttgaagaaggtgaaggaggagaaagaggagggattagaaaggtgacgaggagggagaagacgaggatgatgcggaaattaaccccaaggtgtaatttttgtctgttaatcattcatacgtttctagaaggaaccccagccagccggcggaatgcaagcagcagtaggaaacggaggcgggtgcctggcagaccggctgtcgggactccaggcctgtgggcggggcctcggtccttgccgcagcacaatcccgtggacagagcttactccatctaactcgttttcaagtgcatgattttcactttcacttttcctttttccttattattttgcttaacttgtacagtggcaactgaaatgcatttcagaaataggaggtttcgtccagcaccctctgcagccttggtgcctgtagctctggacttccctgggcctttccctgtgggagggccctgtagaccacatcagggtggggtgggggtcacttggcaaaaagggccgaggtctggtgatgtggttcccaggatctggaacctctcccacccctcctgcagttggactgaattcttccctttcatccgaagaaacccacttgctgtttccagccgctgaatctgctgagtgtgcagcctgcatcacctgctgtatgccgatcatctcagaaagggctgtgtagagtagggccctgttctccttaggatgttgcttcttgattnnnnnnnnnnnnnnnnnnnnnntcagggttgtgacacaccagcccaggtgagagctgctgcggcgtcacctcatatttaatttatcccttcttgcctgtgaggactgcggcttttcgctgtggctcgtccttaacgtttctgaaccaccttggtgccctgagcaggaagatgtgccacttcctagccaggcgcaaggcctgtgcggaagaaacgccgctccctgccaccagggctgaagatgcgagcccgtcctcatgacgcaggcgccaccctgctgccggagccgggcttcggcagtcttctccactgagggactgggctgggaagtcctgcgtttcagtggagcgtatgagcgtcaagtcctgctttctcagtagccccattgcggggccccaccattcatcctgtctgaaggtcctgggtttggtgtgaaccgcttggcggctggtgggtggggttttcaagtgggtgacggcgctctccggcagccggggatggccgtgtccgcactgaccaggcctgtggagagtgctcggcctaaccttagaacacatttgtaactgaatacagtgttttcaatttgtacagaatagttagaatattctattaaagtggtgaaacattgaaaa

SEQ ID NO: 543 - DNA, 1031 bp; single-stranded, linear
  immediate source library: STOMNOT01
  immediate source clone: 221877
atcagaaatataatccaccttaaaattagtactaatgatcacattatttcacaagaactctgctggatgtacagctcttaacattttattaagccatttgtgtagcccaccacgtttctttgtggtgcttgtcctgtgtggaagattgtaaatcttgggcctgttgcatacttccaagggctttaaagcaatgtgattaacagtacttggcctgctgcttttggcttactttgtatttttagctagatgctattatagtgttgaaaggatatggattctgtctgggatgcatttgttgtcctttcagaacccttcctcccattaccctgtgaataaaaacaaatgggaccccctgagaaggacatcttcctacagtgatcacctcaccagcccagtgttgtggctttgtagcgcaccccatatctaccatattctagaacactgtaatgctactaggctggcccagaaaaggtttaaatgttgaattcacttaaattgcaattgttgcaccatcatggaatcgtgatgtgtattatttatattggcggtggactccaaggtgtagagaaaacttgggtcttgggtaatatggaccatttcatcctcagacttgttaggagtacatttcttggtcttgagaccagtatttttcagttatgtatgcaactgcctttattacacctggttatcacaattcaattctcaggtgttgcagaaaaatctacctctttcagactgtaggatgggaataactgtgaaaaaaaatgatgcagatatcttctagtttgtgctaaacacactgctttatttttacagcccacgtctttcatgaggatacgaattgttaagaggcagtctcgttttgcttttcaaagacattttgtagagatttttcactaatgtgaatctgattttatctacttgattctgtatagattaagtaaatatgtatgataaacttaacagcttctgtgtattctttcattatccatgtgaccttaactgtaggagtccaaaggtaccattttacc

SEQ ID NO: 544 - DNA, 860 bp; single-stranded, linear
  immediate source library: LUNGNOT18
  immediate source clone: 2219639
tactctacccagcttgcgctccccagccgcaagtcggccgcgctttgcccgtcagcgcttggagctttctgcgtcgcttcccgctgcgcctgcgcggtcccgcctcgccccacgcgcgggctcgcgcttcggtttccccagacctgctcgcagcaccctgctgtcttcccggtccggcccgctgcccgcggcgccagcaccatgctcttctattcttttttcaagtcccttgtgggcaaggatgtggtcgtggaactaaagaatgacctgagcatctgtggaaccctccattctgtggatcagtatctcaacatcaaactaacttgacatcagtgtcacagaccctgagaaataccctcacatgttatcagtgaagaactgcttcattcggggctcagtggtccgatacgtgcagctgccagcagatgaggtcgacacacagttgctacaggatgcggcaaggaaggaagccctgcagcagaaacagtgatggctcctcctcctcttcccctccctctttcattggtgacccataaccccaagtcccagcccagaacccctaacccccaatacttgaaggggttttgtttttttactaatgatggttttgtgggtttttttttaagggatgaggtggatgagaggagtaatagggaacagctatcctctcttgagaaggggaggctaagtaggctgggaaacttcaaagccttcccagtccccagcacctgcctttctcactacttctctggagatggtaggagagtttcctaggtctttccagggcagcatgtgatttcatttggggatggaaggaatctgtcccgcatcgggaataaaaatttatgatgcaaaaaaaa

SEQ ID NO: 545 - DNA, 1328 bp; single-stranded, linear
  immediate source library: LUNGNOT18
  immediate source clone: 2220010
atggaaacacagggggaaagatatagagcttccgtccaccatctatgaagccctccacctgcctgacatcaagttttttcctaatgtgtatgcattgctgaaggtcctgtgtattcttcctgtgatgaaggttgagaatgagcggtatgaaaatggacgaaagcgtcttaaagcatatttgaggaacactttgacagaccaaaggtcaagtaacttgggctttgcttaacataaattttgatataaaacacgacctggatttaatggtggncaaatatattaaactctatacaagtaagtcagagctttctacagataatttcgaaactgtgggaaatanctnagaggctttttaaaatagggtttatacaagtaagtcagagcttcctacagataattccgaaactgtggaaaatacctaagagacttttaaaaataggctttcttatatttgatatttggaaggaaaaagccgtaaggtgtatgtagaccacttaatcactaaatatctttgcctataggactccattgaatacattagccattgataatctacctgtttaaatggcccctgtttgaactctcaagctttgaagacctacctgttcttccagaagagaacgttgaaagtgccatgtttccttttgcgtgatctctgttgatggcactctggaattgtttcagttaagtcattttagacatagcatttattatcactgtggatctctacttgttgggtgttatgaattctttgaagaaatatattttgaagaggtgtgggaggaaggaatacattttataaaatgttgtagtgaagcccacaattgacctttgactaataggagttttaagtatgttaaaaatctatactggacagttacaagaaattaccggagaaaagcttgtgagctcaccaaacaaggatttcagtgtagattttgtctttcttgaacttaaagaaacaaatgacaaagtttgaatggaaaagcctgctgttgttccacatctcgttgctgtttacattcctttgtggagcctacatcttcctaagctttttagcaggtatatgttgaacacttctgtttcatggttgagacagaatcagaggccatggatactgacaactgatttgtctgttttttttctctgtctttttccatgactcttatatactgcctcatcttgatttataagcaaaacctggaaaacctacaaaataagtgttgtggtttatctagaaaaatatggaaaatattgctgttatttttggtgaagaaaatcaattttgtatagtttatttcaatctaaataaaatgtgaattttgttt

SEQ ID NO: 546 - DNA, 1355 bp; single-stranded, linear
  immediate source library: SEMVNOT01
  immediate source clone: 2223685
caagtggcagagcgtggacgacatcaacaaggtgtttgagtttggccacactaatcgcacgaccgagttcaccaacctgaacgagcacagctcccgctcgcacgcgctgctcatcgtgacggtgcgaggcgtggactgcagcacaggcctccgcaccacggggaagctgaacctggtggacttggctggctcggagcgcgtgggcaagtcgggggccgagggcagccgcctgcgggaggcgcacacatcaacaagtcgctgtcggctctgggggacgtcattgctgccctgcggttcccgccagggccacgtgcccttccgcaactccaagctcacctacctgctgcaggattcgcttagtggtgacagcaagaccctcatggtggtacaggtgtcccccgtggagaagaacactagcgagacgctctattccctcaagtttgctgagagggtgcgctctgtggagctggggcctgggctacgcagggcagagcttgggtcctggtcaagccaggagcatctagagtgggagccggcttgtcagacgccacagccctcggcacgggcccactcagcccccagctctgggaccagtagccgccctggatccatccggaggaagctgcagccctcggcctgacggctggggctgcagagtctctagggaagtcgcggccactgcctgtgtgacggatgtgaccccgctgggcctgaagctgggccctcactggcctgtccctgctgcagcgccaggacccccggaggtagaggcgagagtggaggctcttcttctgccccgtctcccctcaaagatgagaaacatgttcagaaggaaacggtgtctctcggctgtggctctgagtgcaaattgcatgggcggaaaggcgggggtggctgctcttcctggcaggcctgggccatcagcgaactgggccccgtgaggagggcgggagtgtggaggagggtgggcctctcacccaggctttctcggcccctctcctcagcttgcagagctggccagccccctccttagggggtgggcgaggagcctctgggcagacccaagaaccatggggactggggtgggttggtggcaccaatggcagccctccccgcccctctccttcaaggagggttcccgcagctggggggtgtgcggaggcgcatggcctcccgccacggggccgtgctgtgtttatggctggcagaggcagccagcgggtgggggattctgctgctcgctcacctgcctggctcgctggtctctcgaattttcttccctctgaaatcctatttaagaacttttggaagcttagccatttttacttattaaaataaaagaagcctttttacac

SEQ ID NO: 547 - DNA, 1432 bp; single-stranded, linear
  immediate source library: PANCNOT01
  immediate source clone: 222689
aattcggcacgagaatcagaagtcagtttgggagaagtcaaaatggacacaatcttcktgtggagtcttctattgctgttttggggaagtcaagcctcaagatgctcagctcaaaaaaataccgaatttggaggggatctttatcaagaggtttccttrtctcataaggacaacattattttcaccccttggaataactttggttctygagatggtacaactgggagccaaaggaaaagcacagcagcagataagacaaactttaaaacaacaggaaacctcagctggggaagaatttcttgtcctgaagtcatttctctctgccatctcagagaaaaaacaagaatttacatttaatcttgccaatgccctctaccttcaagaaggattcactgtgaaagaacagtatctccatggcaacaaggaattttttcagagtgctataaaactggtggattttcaagatgcaaaggcttgtgcagggatgataagtacctgggtagaaagaaaaacagatggaaaaattaaagacatgttttcaggggaagaatttggccctctgactcggcttgtcctggtgaatgctatttatttcaaaggagattggaaacagaaattcagaaaagaggacacacagctgataaattttactaagaaaaatggttcaactgtcaaaattccaatgatgaaggctcttctgagaacaaaatatggttatttttctgaatcttccctgaactaccaagttttagaattgtcttacaaaggtgatgaatttagcttaattatcatacttcctgcagaaggtatggatatagaagaagtggaaaaactaattactgctcaacaaatcctaaaatggctctctgagatgcaagaagaggaagtagaaataagcctccctagatttaaagtagaacaaaaagtagacttcaaagacgttttgtattctttgaacataaccgagatatttagtggtggctgcgacctttctggaataacagattcttctgaagtgtatgtttcccaagtgacgcaaaaagttttctttgagataaatgaagatggtagtgaagctgcaacatcaactggcatacacatccctgtgatcatgagtctggctcaaagccaatttatagcaaatcatccatttctgtttattatgaagcataacccaacagaatcaattctgtttatgggaagagtgacaaatcctgacacccaggagataaaaggaagagatttagattcactgtgaatgaaaagcacagcctcagaataaaagatgatttctcaaaatagctgattgccaaaatatcgtcatcttgacaatatttactctatatcttatgtcttttctgttttaaactgtgcctgtagtaatagatatctgtcttgatgaataagtaaaattaggtatgcatttgtttcc

SEQ ID NO: 548 - DNA, 540 bp; single-stranded, linear
  immediate source library: PANCNOT01
  immediate source clone: 224798
ccatttcctgtctgaaggttgtaaacagttcattgcttttngccatggtagtctggaattcttcaaacttatccatataaagagaaagctgctgttttagttgtactgcttgctgtttcatttgtncgtatttgtgcctcgattctgtcgcttcttttaanaaaaactctctctctctctgatgtttttcatcagcttctgttatcagttgtgtcgnttgctgcagtttggcatccacgagctgctgtggctcgngccgaattcggcacgngncggcgtcatcttttccatttcctgtctgaaggttgtaaacagttcattgctttttgccatggtagtctggaattcttcaaacttatccatataaagngaaagctgccngttttagntgtacntcttgccgtttccaattnttcntatttnagcccccantctgtcggttcntttaataaaaacccctcctcncaccccgaaggttttcancnngttcntttaacaagtggggtnggtttccgcaanttnggaatcccggggctccng

SEQ ID NO: 549 - DNA, 1009 bp; single-stranded, linear
  immediate source library: OVARTUT01
  immediate source clone: 2252906
gaaggaagcatgtgggggtagatctggaggtgacaagggagggatccttctgggataatgggtcttcagagactgtttcagtttagactccagtgaccccagaactagtgtgattggggttcttgtctccaggataaaaatggtaaagagttgtcagatgaggacataagagcagaagctgacactttcatgtttggaggccatgacaccacggccagtggcctctcctgggtcttgtacaacctcgcgaggcacccagaataccaagaacgctgccggcaggaggtgcaagagcttctgaaggaccgtgagcctaaagagattgaatgggacgacctggcccagttgcccttcctgaccatgtgcctgaaggagagcctgcggttgcatcccccaatccctacattcgcccgcggctgcacccaggacgtggtgctcccagacagccgagtcatccccaaagggaatgtctgtaacatcaacatcttcgcaatccatcacaacccctcagtctggccagaccctgaggtctatgaccccttccgcttcgaccccgaaaacgcccagaagaggtcacctatggcttttattcctttctcggcggggcccaggaactgcatcgggcagaagttcgcgatggcagagatgaaggtggtcctggcgctcacgctgctgcgcttccgcatcctgcccgaccacagggagccacgcaggacgccggagattgttttgcgtgcggaggacggactttggctgcgagtagaacccctgggctgaggcctgcagtgacccacccacctacctttgcatcacctacctttgcaccaactaccttttcagatttccggtaataaatctgtgttggcccctgtgcctcagtcccgcggatggccagtagggggcgctggaggactgcggggatctagggcctggctgggaagaggcggggagatgtctctgtgcccaagatactcactgcctctctgggtgancacaggagccccgtgct

SEQ ID NO: 550 - DNA, 2291 bp; single-stranded, linear
  immediate source library: OVARTUT01
  immediate source clone: 2256528
ctcttcagcccccattacagcataccactccccaagcacaggctcagagtctgagtcgtcctgcacaagtaagccagcctttcagaggattaattcctgctggaacacagcatagcatgattgcaaccacaggaaaaatgtctgaaatggaactaaaagcctttggaagtggcattgatataaaaccaggcacacctccaatcgctggtagaagcaccacaccaacatctagtcccttccgggctacttctacaagtccgaacagccagtccagcaaaatgaacagcattgtctaccagaagcagttccagtcagcccctgccactgtgagaatgacacaaccatttcctacacagtttgcaccccaggcaaagcagagagcagaggttcttcagtccacgcaacggttcttctctgaacagcaacagagcaaacagataggaggaggcaaagcccagaaagtggacagtgattcaagtaaacctcctgaaacactgaccgaccctcctggggtctgtcaggaaaaagtagaagaaaagccaccccctgcaccctccatagccaccaaacctgttagaactggaccaatcaaacctcaggcgatcaaaaccgaagaaacaaaatcttaaaggctatggtttattgcaggggattgggaggggggcgggaaaacatggagaattaagtcagataatgctggcagccaaaggggcaaaatggcctgtgacattatcctgttcagagcttggagatgtacaagggacataggagcaatttacactgacacacagctgctgtaccagtgaaaacgaggctttgcaagcttgtacctactatataacatgtgcttggttgatggccatgcattttcagtcagaatttatatataaatatatgcacccatttttttgagtgcatataatttagacctaaaaatccttatgattaggtgaaacaccaaaaatataaggaaaataacacagcagaggaatagctcagcctgaacagtgtgatggtcccagctactacatcagatgcggttttttttgctcccttatgttcttcggatatggttatggcatttgtaggcttggaggtaaagaactgaagataactggtgctggatagaggagccttattttttattatggcagcttgctatttttataacatggtgattgagttgaacacaatcaaagtacagtagtaactgatgtccccttcttcctggatgaatgacgcagataaatattgatgtcagcatccttgaaccatatcaaagtgagcagtgtttggctactgcttctatttgaaatggtgctgtgttttggttgtggtctgaagctttgaagcgctacttagcatctcctttcttccatggagctctcacgattcaaacatgacagatttggtaaaatgctggttaggttgagtcttccttgcccccactcagtcatctttgtatgaatcccatgatttgggggttttttttctntttttttttataccagtttttagctggtgtttatgaagaacagtgagtacctagaactgtgccactaattaaaggaaatcctaagaaggtgcatttctttacagagctgtgtcatgccatcctttgggccctctgctggaaaagtagaatcaagtctcaaataatgcctttttaattgtatcctctagtattatagatataggacagtactgtatcatacctctgtgaatgtaaaatatcttgtacctgctttatgatacgtagtagtgaccgtgctttatcagagctgtttttaatgatgttattctagaatgttttctttccagatgatgattcagaagctaattttaaaaaacggtgccaggtaccacaacagtaacagaactttgcaattttctggggttttgttttttacctttttccccccttttttttaaatggagtgtgctggatgtctctataattttattcagatgactgcagaacctggaaaagctgttgctgctattgatgcataacatactgctattggtcnnnnnnnnnnnnnnnnnnnnnnnnnnnnnnnnnnnnnnnnnnatttgaatttttggaaactttagctgtgctgtcaactttggaaaaagtatcccggtttactgtgttgagttggcattgtacagaaattaacagccatattggtctagaaacgttaaacttaatttttttccatttgtacaggggtaacgcactgtattaaatatgtaaggtcttatctacatgggtttgattacagaaactaataaagtattctctaaat

SEQ ID NO: 551 - DNA, 1275 bp; single-stranded, linear
  immediate source library: OVARTUT01
  immediate source clone: 2258960
gatggccagtgggtctctgatgccttgcctgcagcagaaggagggagcagagatcaagaggaaggaaaaaatcatatgtacttatttgaaggtaaagattattctaaagagcccagtaaggaagacagaaaatcatttgaacaactggtaaaccttcagaaaacccttttggagaaagctagtcaagagggccgatcactccgaaataaaggcagtgttctcatcccaggccttgtggagggatctaccaaaaggaagcgggttctgagtccagaagagctggaggacagacagaagaaaagacaagaagcagctgccaagagaaggagactcatagaggagaagaagaggcaaaaggaagaggctgaacataagaaaaagatggcctggtgggaatccaacaattaccagtccttctgcctgccctctgaggagagcgagccagaggaccttgagaatggggaagagagctctgctgagctggattaccaagacccagatgctacttccctcaagtacgttagtggtgatgtcacccaccctcaggctggggccgaggatgctctcattgtgcactgcgtagatgactctggccactggggcagaggtggtttatttacagctctggaaaagcgatccgctgagccaaagaaaaaatatatgagctggctgggaaaaatgaaagacctgagtttgggaggtgtccttttatttcctgttgatgataaagaatcaagaaacaaagggcaagatttgttggccttgattgtggctcagcatcgtgatcgttccaatgtcctgtctggcattaagatggcagccctagaagagggcctgaagaagatatttttagcagcaaaaaagaagaaagcaagtgttcatcttccacgtattggacatgccacgaaaggttttaactggtatggtactgagcgacttattcggaaacatctggctgcaagaggcatcccaacttacatatattattttcctagaagcaagtctgctgtccttcattcacagtcttcatcttcctcctcaagacagctggtgccttaagaattggcccagcctcagatcctgtctttagcaaccagctaatatttacccagaggtactgcaatagagtatttcaaaatgggatcaggatctggtgggcctcagaaattgtctnttttctgagtttcagnttngtnctcctggatgttttgctctgttttggtacctgtaatatagggaaanaaaactttttttcggaaagacctttgnncccag

SEQ ID NO: 552 - DNA, 1201 bp; single-stranded, linear
  immediate source library: OVARTUT01
  immediate source clone: 2259319
ctgcgtccccgctggagctgctggaggccaagccaaagcgnggccgccgctcttggccccgcaaacgcaccgccactcacacctgcagctacgcggggctgcggcaagacctacaccaagagttcgcatctgaaggcgcatctgcgcacgcacacaggtgagaagccctaccactgcaactgggacggctgcggctggaagtttgcgcgctcagacgagctcacgcgccactaccgaaagcacacgggccaccggccattccagtgccatctgtgcgatcgtgccttctcgcgctccgatcacctgggcgctgcacatgaaacggcacatgtagccgggacgcccccgcccacctgcgcgcggccgtggcgggtcccacgcgccgggcgcggcccccttcccaaactgtgactggtatttattggacccagagaaccgggccgggcacagcgtggctacagagggtctccctccgatgacgacgacgacgacgccaccaccccagcccccgtctgtgactgaaggcccggtgggaaaagaccacgatcctccttgacgagttttgtttttcaaaatggtgcaataatttaagtggcatcttctctcccaccgggtctacactagaggatcgaggcttgtgatgccttgtgagaaataagggccttaatttgtactgtctgcggcattttttataatattgtatatagtgactgacaaatattgtattactgtacatagagagacaggtgggcatttttgggctacctggttcgtttttataagattttgctgggttggttttttttttattaaaaagttttgcatcttttaaaaaaaatcacagcactggtctgngtctggcttggaactggggccttggggcacttgggaggaggggggagcggagagtttgatggagggcagcccccactaaagcatcgtgtgcagtgggtcctgcgtctgccagcaccgggactgccagctgctgtgcctgcctgccaggaacctgtgggtttttctgtaaatttagacactgcattttaggactgagggagggttattttaaggttgttctttgagccataaattgcctctttgccccacagctggggaaagtgctggtcccactgacgtggcctcctctacgttgaaaaaaataaaactacttacctcttcctggaagcctctgaggttttagcca

SEQ ID NO: 553 - DNA, 1473 bp; single-stranded, linear
  immediate source library: PROSNON01
  immediate source clone: 2270581
gagaggagtgagtgccgtcaccgagggccgcgccagactgcgacggatacagggagggcaagggtttccttttggcgcttccctttggaccccggagtgaaaaactctaacgtccagatcagtggagagaaacgcagatttaggaccctgaggagtctttttcacccgtttcccgtcactcgctcaggcgcgccgagggcagtccttgtggggtcctcgtggccagccaagatggttgcccccgcagtgaaggttgcccgaggatggtcgggcctggcgttgggcgtgcggcgggctgtcttgcagcttccagggctaactcaggtgagatggagccgctatagtcctgaattcaaggatcccttgattgacaaggaatattatcgcaagccagtggaggagctaactgaggaggagaaatatgttcgggagctcaagaagactcagctcatcaaagctgctccagcagggaaaacaagttctgtgtttgaagacccagtcatcagtaaattcaccaacatgatgatgataggaggaaacaaagtactggccagatccctcatgattcagactctggaagctgtgaaaaggaagcagtttggagaagtaccatgccggttctgcagaggaacaggcaaccatcgaacgcaacccctacaccatcttccatcaagcactgaaaaactgtgagcctatgattgggctggtacccatcctcaagggaggccgtttctaccaggtccctgtacccctacccgaccggcgtcgccgctttcctagccatgaagtggatgatcactgagtgccgggataaaaagcaccagcggacactgatgccggagaagctgtcacacaagctgctggaggctttccataaccagggccccgtgatcaagaggaagcatgacttgcacaagatggcagaggccaaccgtgccctggcccactaccgctggtggtagagtctccaggaggagcccagggccctctgccgcaagaaacagtgtgagctactgccacgctgaaaactacctgtgggttaaggatgtagttcctttgtaagggtgggcaggcctcgtaagaaagatgtagcagcatattcactatccgttaatccttctttctttgaggctggaacttgctctctctgcccctatttccttgtaaagagggagcacattgacttgggaatttcctccaggaaactcagggctgttttctcttcccttaggttggggcggacctttggacatataaaggaagcagttttagtatcagaaaagatttattagaaaattctcacgctgaactggtgtagcatgtggtgcagcattcagtgaaactggctggaggaaataggcttgtttccagagttgtccttatacaaaatgtataaaaagcagtttctggtgaaaaanaanaanannnnngangnnnaangagcagaaagaaaaaaatnnnnnnngannnccc

SEQ ID NO: 554 - DNA, 1433 bp; single-stranded, linear
  immediate source library: PROSNON01
  immediate source clone: 2271485
aagcaagagcgcggcgagggtccacgcgcgggcgagaaggggtcccacgaggaggagccggtgaagaaacgcggctggcccaagggcaagaagcggaagaagattctgccgaatgggcccaaggcaccggtcacgggctacgtgcgcttcctgaacgaggcggcgcgagcagatccgcacgcgccacccggatctgccctttcccgagatcaccaagatgctgggcgccgagtggagcaagctgcagccaacggaaaagcagcggtacctggatgaggccgagagagagaagcagcagtacatgaaggagctgcgggcgtaccagcagtctgaagcctataagatgtgcacggagaagatccaggagaagaagatcaagaaagaagactcgagctctgggctcatgaacactctcctgaatggacacaagggtggggactgcgatggcttctccaccttcggatgttcccatcttcactgaagagttcttggaccaaaacaaagcgcgtgaggcggagcttcggcgcttgcggaagatgaatgtggccttcgaggagcagaacgcggtactgcagaggcacacgcagagcatgagcagcgcgcgcgagcgtcattgagcaggagctggcgctggaggagcggaggacgctggcgctgcagcagcagctccaggccgtgcgccaggcgctcaccgccagcttcgcctcactgccggtgccgggcacgggcgaaacgcccacgctgggcactctggacttctacatggcccggcttcacggagccatcgagcgcgaccccgcccagcacgagaagctcatcgtccgcatcaaggaaatcctggcccaggtcgccagcgagcacctgtgaggagtgggcgggcccacgatgcagaggagaagctgtgggcgcggccctgccacaccccaccccgtggacgagaggctgggggtccaccctttggggcctggtcccatcctgcaccttgggggctccagcccccctaaaattaaatttctgcagcatccctttagctttcaatctccccagccccctgaacccggaaaaagcactcgctgcgcgatacacccagaagaacctcacagccgagggtgcccctcctcggaggacagccacgcgctacactggctctccgggccacccccaggacacagggcagacgaaacccacccccagcacacggcaggaccccccaaattactcactacggggggctgtgccataggccacacaggaagctgccttgtggggacttacctggggtgtcccccgcatgcctgtaccccagatgggtgggggccggctttgcccatcctgctctcctccagccgagggaccctggtgggggtggctccttctcactgctggatccggactttttaaataaaaacaagtaaaatttgtgttttaaaaaa

SEQ ID NO: 555 - DNA, 747 bp; single-stranded, linear
  immediate source library: PROSNON01
  immediate source clone: 2279032
attaaacctcactgaaacctgctccgtgcccggatgttgatcatgctggtggcttggttactgtgactgtagctggagtggcacaggtgacccaggcgtcctttcagctccagaatgttgcaagtctaggagagtgttccaatggctgacagaaactgcctatttgaaatggctcataagtagtatctgcagtgtgttcatccgttgctgccttaacaagtcacccacacgtagtnnnnnnnnnnnnnnnnnnnnnnnnnnnnnnnnnnnnnnnnnnnnnnnnnnnnnnnnnnnnnnnnnnnnnnnnnnnnnnnnnnnnnnnnnnnnnnnnnnnnnnnnnnnnnnnnnnnnnnnnnnnnnnnnnnnnnnnnnnnnnnnnnnnnnnnnnnnnnnccacttccaagccagtgccctcangtggctgtcggtgacagccacagttccttcccatgggggcccctacacgaagctgcttgagcatcctcacggcatggcctctgccttccccagagcaggtgaaccaagggagaggaaggagcaagccacagtgcttctatgagccaccatgagaagtctcacgtgatcacttccgccacagcctgtttatcaaaagcaagccccccaggcccagcccacgtgcagagggaggagaatgaggttctgtgttttgaagggaagaatatcagaattggtagacatttcaaactgtcacattagggatacaaaaatgaacaggctgggagtggt

SEQ ID NO: 556 - DNA, 575 bp; single-stranded, linear
  immediate source library: BRAINON01
  immediate source clone: 2284186
ccacacggcgctgcacctggcctgccgtgtgggggcacacgcctgtncccgtgccctgcttcaancccgcccccggcgccccagggaagcccccgacacctacctcgctcagggccctgaccgtactcccgacaccaaccatacccctgtcgccttgtaccccgattccgacttggagaaggaagaagaggagagtgaggaggactggaagctgcagctggaggctgaaaactacgagggccacaccccactccacgtggccgttatccacaaagatgtggagatggtccggctgctccgagatgctggagctgaccttgacaaaccggagcccacgtgcggccggagcccccttcatttggcagtggaggcccaggcagccgatgtgctggagcttctcctgagggcaggcgcgaaccctgctgcccgcatgtacggtggccgcaccccactcggcagtgccatgctccggcccaaccccatcctcgcccgcntnctccgtgcacacggagcccctnagcccgagggcgaggacgagaaatncggcccctgcagcagcagtagcgacagnacca

SEQ ID NO: 557 - DNA, 1060 bp; single-stranded, linear
  immediate source library: LUNGNOT20
  immediate source clone: 2315951
ccgtgggtttgcgacgtttagcgactattgcgcctgcgccagcgccggctgcgagactggggccgtggctgctggtcccgggtgatgctaggcggctccctgggctccaggctgttgcggggtgtaggtgggagtcacggacggttcggggcccgaggtgtccgcgaaggtggcgcaccatgggcggcaggggagagcatggctcagcggatggtctgggtggacctggagatgacaggattggacattgagaaggaccagattattgagatggcctgtctgataactgactctgatctcaacattttggctgaaggtcctaacctgattataaaacaaaccagatgagttgctggaccagcatgtccagattggtgtaaggagcatcacgggaagtctggccttaccaaggcagtgaaggagagtacaattacattgcagcaggcagagtatgaatttctgtcctttgtacgacagcagactcctccagggctctgtccacttgcaggaaattcagttcatgaagataagaagtttcttgacaaatacatgccccagttcatgaaacatcttcattatagaataattgatgtgagcactgttaaagaactgtgcagacgctggtatccagaagaatatgaatttgcaccaaagaaggctgcttctcatagggcacttgatgacattagtgaaagcatcaaagagcttcagttttaccgaaataacatcttcaagaaaaaaatagatgaaaagaagaggaaaattatagaaaatggggaaaatgagaagaccgtgagttgatgccagttatcatgctgccactacatcgttatctggaggcaacttctggtggttttttttttctcacgctgatggcttggcagagcaccttcggttaacttgcatctccagattgattactcaagcagacagcacacgaaatactatttttctcctaatatgctgtttccattatgacacagcagctcctttgtaagtaccaggtcatgtccatcccttggtacatatatgcatttgcttttaaaccatttcttttgtt

SEQ ID NO: 558 - DNA, 509 bp; single-stranded, linear
  immediate source library: COLSUCT01
  immediate source clone: 2349047
gaaaaagggtaacaacccggaaagtagactcaccgtcttggtctagagactgacccctgcacagacagaccccttcccctctctgcgaaaggaccaagccccagaagtcactccatctcctacggctcgcaatttccagaggccccctggcaccttccagcctgatgtcgtgcgtcaagttatgctggcagattttggcctgtccacatttcagggaggctcacagtcagggacagggtncggggagccagggggcaccctgggctacttggccccagaactgtttgttaacgtaaaccggaaggcctccacagccagtgacgtctacagcttcgggatcctaatgtgggcagtgcttgctggaagagaagttgagttgccaaccgaaccatcactcgtgtacgaagcagtgtgcaacaggcagaaccggccttcattggctgagctgccccaagccgggcctgagactcccggcttagaaggactgaaggatctaatgcagctctgct

SEQ ID NO: 559 - DNA, 464 bp; single-stranded, linear
  immediate source library: LUNGNOT20
  immediate source clone: 2353627
ctttgtttgaatttctaatcatcattcaaaagagcagtaaaaaatggttacttgttcttgtacaagctactaattagactatagtaggatattttaaagagctgaatcacttttggtattttggtataaatattttcatttgttatgtcccagtatattctttactgggaaaattcttgttttgatctgcctgaagaaaatatctgttttctatataaaaaaattttttaaaataattgtaaagttagatttaaaattgtaaaatataaaatcacaaaggaatgtaccttatgaatgttgttgacattttatgaaattatgtggattcatattactgttacaagatagaattgaatgcaaaaagaccaaaacctcaataaaatttgaggaaaacgtgttattatgtaattgaaataaaaacattttataattgtgcaaaananaaagganaanaagagngngaa

SEQ ID NO: 560 - DNA, 1062 bp; single-stranded, linear
  immediate source library: LUNGNOT20
  immediate source clone: 2356044
tatgtctatatcccctctaagacggacctgggtgcagccgcagttccaagcgccccacctgtgtgataatggtcaagccccatgaggagtaccaggaggcttacggtgagtgcctggaggaggtgcagttcctgcccctacccctatgaggggcttcggtagcaactgggcaactgccgctggaagctattgggctngcaacaaggacgacttgctgttcttctgcccaaccacaatnacggcattttccagtttcccaaggnaaggcttttttccaagcattaccttcatgaaagggctgttagagctgcctgggaagaaggcgtgccttggggaactgggaagatgccgtcagtgtgggtgggcaggaggacaggctgtcctcctgctgccagcccaatacttccagcggcaggtgcccaggtgctaccggagcccctcataggggtaggggcagggactgcacctcctccaggcactcatcgtaagcctcctggtactcctcatggggcttgaccattatcacacaggtggggcgcttggagcctgcggctgcacccaggtcctacagaggggaaagaagtgctgtttggaaaaaagctgtacaacctgtatgcccaggaagtcaccaactgatgacccaccagcctaatctggcccacaaccatgttctgttcggtccatgttctatttaaaagcatcttgcaattggttgccatcatttaaactcaatcagactttgaaggcatggtccagccacacagggcctacattcccacatggcaactatgaaagggctccagcccagcaggggctgtcccggtccctgccacccccacttcctgtgcctcagatctggcccctgttacgtaagataaggacagctacaggtccctctgagcctaaacccacctaaccggactaacatgggtgaagatcttagcttacaaagctctttcacatacatctatntntttattctcatagtccacagataactgactatttggttcttaccatcaggccaaacggtaagttccttcagaacagggcctcctgctt

SEQ ID NO: 561 - DNA, 238 bp; single-stranded, linear
  immediate source library: ADRENOT07
  immediate source clone: 2365149
gtccaaactgaggcatcaccacaggcggtggcgttttaccttcagccactttgtggttgaccctgaccaggaatatgaggtgaccgttcaccacctgcccaagcccatccctgatggggacccaaaccaccagtccaagaatttccttgtgcctgactgtgagcacgccaggatgaaggtaaccacgccatgcatgagctcaggcagcctgtgggaccccaacatcaccgtggagacc

SEQ ID NO: 562 - DNA, 1485 bp; single-stranded, linear
  immediate source library: SINTNOT02
  immediate source clone: 236660
gctgtttctttgacacaaatatcacaggcttcagggttaagattgctgtttttctgtccttgctttggcacaacacactgagggttttttttattgcgggtttgcctacaggtagattagattaattattactatgtaatgcaagtacagttgggggaaagcttaggtagatatattttttttaaaaggtgctgcctttttggatttataagaaaatgcctgtcagtcgtgatagaacagagttttcctcatatgagtaagaggaagggactttcactttcaagtggaacagccatcactatcaagatcagctcatggaaggagtaaagaaaatatctcaaaatgagacaaactgaagttttgttttttttttaatgacttaagtttttgtgctcttgcaagactatacaaaactattttaagaaagcagtgatatcacttgaacttcagtgccctcactgtagaatttaaaagccttactgttgattgcccatgttggacttgatggagaaattaaatatctttcattatgctttacaaaatactgtatatgtttcagcaagtttggggaatgggagaggacaaaaaaaagttacatttaatctatgcatttttgccaagccatattgagttattttactactagagacattaggaaactaactgtacaaaagaaccaagtttaaaagcattttgtggggtacatcattnctataattgtataatgtatttctttgtggttttaaatgataaagacattaagttaacaaacatataagaaatgtatgcactgtttgaaatgtaaattattcttagaacactttcaatgggggttgcattgtccttttagtgccttaatttgagataattattttactgccatgagtaagtatagaaatttcaaaaaatgtattttcaaaaaattatgtgtgtcagtgagttttttcattgataattggtttaatttaaaatatttagaggtttgttggactttcataaattgagtacaatctttgcatcaaactacctgctacaataaatgactttataaaactgaaaaaatgtaggaggttgcaaccaacattaaaagggaattatgggaaatacaatccatgatgtttttccagttaaccataggggntttaccagataaatactgtttaaactcttgtccagtaacaagagttgattcatatggacagtatgatttattgtttatttttttaaccaaatacctcctcagtaatttataatggctttgcagtaatgtgtatcagataagaagcactggaaaaccgatcgtctctaggatgatatgcatgtttcaagtggtattgaaagccgcactgatggatatgtaataataaacatatctgttattaatatactaatgactctgtgctcatttaatgagaaataaaagtaatttatgggatggatatctttaatttttactgcaatgtgttttctcatggctgaaatgaa

SEQ ID NO: 563 - DNA, 1274 bp; single-stranded, linear
  immediate source library: SINTNOT02
  immediate source clone: 237704
cattcccctacaccccagcagtcaaaccgtacaagaaaaagtcgtgtttctgtgtctccagggagaacttcaggtaaagtgaagctgaagataaccttgatgatttagaaaagcacctgcgtgaaaaggccctgaggatcaatgaggaaggcccaagtgtccccacagtcttagggggaaatgtttgttatgatgtaaattttatttggtttgtacgcagttcaatttcaaaattgctaaaatgtgtttgagctttagactataacatttgttgtaataattgctaggttgaagttcaacatgtaaaaaaagggggcatggatttccattgcaaaaggtgtccacagtgtattagtgacattctttcattgacagctgacataattcattggagtgaaatattttaagccaaaaaaaaattccctttttaaaaaagggggtttaaatactgttggcatttttatggttcctttaaatgccctagctattcccagaggggtttttttgtttgtttttttggttttnatttnctttttgtttttctttcttcttcttatttttttcatttgagtcttagctcccatttaagttatgcttctgaccttgtatggtctgtaagcttgcccagaaataagaccactgttttgaactaccacaaaagtataaatgaatattttaatgccacaatctttcctgttgcctgtggagtctctgcctgaaatgcaatcaggattcgagctctaggatgagacagaaaatgaaagcatgttgtttgccaggacactgtgggtttatattgatgtgtaacaagttgatttggaacactggactctcattctgttattctggttttgttttttttgttttgttttttttcttttgtaaaggcaatgagctagtcccagaaaggatccttcagttacatacaatttgtttaatgaaatgtcatggctctgttcatatttttgtcttgttcttccaattggtatatacaactttcagagcctcttgtatttggaaggctggaagggcccagactttggaatagtgtcttggtttcactgtttttgttttgattttttttttgttttgattttttttaaactaaagctatataaagcttgtggattaaacagaataaatttctaaattttttaaaaaactaaaataacacttcacacccactanggtnggctataataaaaaaaanaaacaaataaaacaaangatantaacaantngttnggtnangggtacnaacaaaccagacacat

SEQ ID NO: 564 - DNA, 1122 bp; single-stranded, linear
  immediate source library: HIPONOT01
  immediate source clone: 239988
cacttttcttcttttgagcatatctgcttttactttaaatctgctaatttctaaaatgtagagtccttcaccaatcccagagactcaatttggaaatgaactgatttcaagccgttactgtgaataaagcaccccagcattttgtataagctcttaattaaacctgtacagcttctttacctgatttaagaaagggagacaagcaataggggggaataagcttcttcaaaattcattccaagcacaaaagaaattttttccctttgcatataaacttgacatcagttgattctgttggggtcggggtgggtatgcagggattgccttttattatcaagtgatttatttcaagagcctttgaggggattcaggtgaaggaacccccatctgtgctggagagttggatactcctttaaatagcccccaccacagtcataacaataatgataatgctggattatttgttaagccaaggttgtctgcctcatatccatcatgctgtttgcaatattcttgctttcaatcaatttatactgagtgtaactttaggatttctgctattaaatgcatgctctctatcctgcttcagtttctggctttgctttgtctgtttcaaaatatgtagcttcctcttttgtacaacaaaaaactcattctcacttttactaaatatactgtaggagtcatcattgatgttatttttctcttatatatctgtaaagatttttggcatatgaatgtaatattaaagtcaatgatgctataacttgcgatgtttgcatcatgtcaacctttttgaaggagtgaaaaagccctactatgtttttaaatagcaagtgtaagctcagtgctagagtggatatacacaccgcatgttttcatatgtggcacttttatgtatcatgttgggttattgttctagactggactgttaaatactatgtttgaggctgggttgtcatttttataactgtcttggtgttttatggccattatttattacttttgatacacagaatgagctgcatgcatttatagagcaataagaggatgtatttaatgtgccttgtttttaactgaataagaactggaagcatgaatcaataaaactgattaaaatgg

SEQ ID NO: 565 - DNA, 528 bp; single-stranded, linear
  immediate source library: HIPONOT01
  immediate source clone: 240885
cagaagcgtctctggatggcagccgggagtatgtgaatgtttcccaggaactgcatcctggagcggctaagactgagcctgccgccctgagttcccaggaggcagaggaagtggaggaagagggggctccagattacgagaatctgcaggagctgaactgagggcctgtggaggccgagtctgtcctggaaccaggcttgcctgggaacggctgagctgggcagctggaagtggctctggggtcctcacatggcgtcctgcccttgctccagcctgacaacagcctgagaaatccccccgtaacttattatcactttggggttcggcctgtgtcccccgaacgctctgcaccttctgacgcagcctgagaatgacctgccctggccccagccctactctgtgtaatagaataaaggcctgcgtgtgtctatgttgagcgtgcgtctgtgtgtgcctgtgtgcgagtctgagtcagagatttggagatgtctctgtgtgtttgtgtgtatctgtgggtctccatcctcc

SEQ ID NO: 566 - DNA, 495 bp; single-stranded, linear
  immediate source library: THP1NOT03
  immediate source clone: 2448372
gagaaaccggcggaggtgccgggcgagcccagcgacaggagccgcgaggactgagggcggtatacggtgcggggcctgggatgcccgcgccacccgcagccccctcactcggcggaaacccgcgagccggcccttccgcgtccaagaagtttacttcctaagcctttttattatgatcttgaatgcggacaattggggccaaacgaggaaggacacagacccaaaagccagacccaggtcccagcgcgcttctgggctctaacctgggagactcgcatccagcccggcggaagctacagtctctaccctgagctccgtggcgcagagcgttccangngtattnaaggnccgnttcttggctncaaccncancccgtctngggcctnnccttccggccggggagccttcaggganaaaaccgtttttgacgtngggganccaacggttnggcttaaggcaaaanggnctnagatttncccggggnaaaccgttggg

SEQ ID NO: 567 - DNA, 1743 bp; single-stranded, linear
  immediate source library: THP1NOT03
  immediate source clone: 2471348
agaatctggaccagcagatgacatcaagccatgcccacgatgcagtgcatacattatcaagatgaatgatggaagctgtaatcacatgacctgtgcagtgtgtggctgtgaattctgttggctttgtatgaaagagatctcagacttgcattacctcagcccctctggctgtacattctggggcaagaagccatggagccgtaagaagaaaattctttggcagctgggcacgttgattggtgctccagtggggatttntntnattgctggcattgncattnctgccatggtcattggcattcctgtttatgtnggaaggaagattcacagcaggtatgngggaaggaaaacctccaaacacaagaggaatttggctatcactggaggagtgactttgtcggtcattgcatccccagttattgctgcagttagtgttggtattggtgtccccattatgctggcatatgtttatggggttgtgcccatttctctttgtcgtggaggcggctgtggagttagcacagccaacggaaaaggagtgaaaattgaatttgatgaagatgatggtccaatcacagtggcagatgcctggagagccctcaagaatcccagcattggggaaagcagcattgaaggcctgactagtgtattgagcactagtggaagccctacagatggacttagtgttatgcaaggtccttacagcgaaacggccagctttgcagccctctcagggggcacgctgagtggcggcattctctccagtggcaagggaaaatatagcaggttagaagttcaagccgatgtccaaaaggaaattttccccaaagacacagccagtcttggtgcaattagtgacaacgcaagcactcgtgctatggccggttccataatcagttcctacaacccacaggacagagaatgcaacaatatggaaatccaagtggacattgaagccaaaccaagccactatcagctggtgagtggaagcagcacggaggactcgctccatgttcatgctcagatggcagagaatgaagaagaaggtagtggtggcggaggcagtgaagaggatcccccctgcagacaccaaagctgtgaacagaaagactgcctggccagcaaaccttgggacatcagcctggcccagcctgaaagcatccgcagtgacctagagagttctgatgcacagtcagacgatgtgccagacatcacctcaggatgagtgtggctccccccgctcccatactgcagcctgcccctcgacccccagagcccaaggtgcaccgagcccaagtgcccatatgaacctctctgccctagccgagggacaaactgtcttgaagccagaaggtggagaagccagagtatgaagtggaatgaatgctcctgttctgagaagcacacttgtaactgcatcnnnnnnnnnnnnnnnnnnnnnnnnnccaaggggtagagatttatgtattttatttcacagattctctggtcacaggtttttgcccagggaaattctgagaaattcacaatttcttaccagataaaacatgaaaagtttgccgttagttcccctcccctcccctccctctttttagttttaatttattggttaaactgatggcagcaatccatgaggtgtgtcaaagagtgtacatatgtatgtgtgtatattgaatgctaaacatattactgaaagacacattttaataaagatttctgtcataattcaaaaaaaaaaaaaaa

SEQ ID NO: 568 - DNA, 1560 bp; single-stranded, linear
  immediate source library: THP1NOT03
  immediate source clone: 2473119
gcatttatcaccttctgtggaaaggaagctgcacaggaagccgtgaaactgtgtgacagctatgaaattcgccctggtaaacaccttggagtgtgcatttctgtggcaaacaacagactttttgttggatccattccgaagaataagactaaagaaaacattttggaagaattcagtaaagtcacagagggtttggtggacgttattctctatcatcaacccgatgacaaaaagaagaatcgggggttctgcttccttgaatatgaggatcacaagtcagcagcacaagccagacgccggctgatgagtggaaaagtaaaagtgtggggaaatgtagttacagttgaatgggctgaccctgtggaagaaccagatccagaagtcatggctaaggtaaaagttttgtttgtgagaaacttggctactacggtgacagaagaaatattggaaaagtcattttctgaatttggaaaactcgaaagagtaaagaagttgaaagattatgcatttgttcattttgaagacagaggagcagctgttaagggctatggatgaaatgaatggcaaagaaatagaaggggaagaaattgaaatagtcttagccaagccaccagacaagaaaaggaaagagcgccaagctgctagacaggcctccagaagcactgcgtatgaagattattactaccaccctcctcctcgcatgccacctccaattagaggtcggggtcgtggtggggggagaggtggatatggctaccctccagattactacggctatgaagattactatgatgattactatggttatgattatcacgactatcgtggaggctatgaagatccctactacggctatgatgatggctatgcagtaagaggaagangnggnggaaggggagggcgaggtgctccaccaccaccaagggggaggggagcaccacctccaagaggtagagctggctattcacagaggggggcacctttgggaccaccaagaggctctaggggtggcagagggggtcctgctcaacagcagagaggccgtggttcccgtggatctcggggcaatcgtgggggcaatgtaggacgcaagagaaaggcagatgggtacaaccagcctgattccaagcgtcgtcagaccaacaaccaacagaacttggggttcccaacccatcgtttagcagccgcttcagcaaggtggtgactattctggtaactatggttacaataatgacaaccaggaattttatcaggatacttatgggcaacagtggaagtagacaagtaagggcttgaaaatgatactggcaagatacgattggctctagatctacattcttcaaaaaaaaaaaaattggcttaactgtttcatctttaagtagcattttgctgccatttgtattgggctgaaggaatcactattgtgtatatactcaaagtctttttatttttcctcttttcataaatgctcttgggcattattggggcttcaaggggtnccctattctggggggttcaatgctttaccggtnaagggttcattttaggtcaaacaagggg

SEQ ID NO: 569 - DNA, 1834 bp; single-stranded, linear
  immediate source library: PANCDIT01
  immediate source clone: 255361
gtcccgacatgaaggtgtcagctgtgatgcatgtttaaaaggaaattttcgaggtcgcagatataagtgtttaatttgctacgattacgatctttgtgcatcttgttatgaaagtggtgcaacaacaacaaggcatacaactgaccacccaatgcagtgcatattaacaagggtagattttgatttatactatggtggggaagctttctctgtagagcagccacagtcttttacttgtccctattgtggaaaaatgggctatacggagacatctcttcaagaacatgttacttctgaacatgcagaaacatcaacagaagtgatttgtccaatatgtgcagcgttacctggaggcgatcctaatcatgtcacggatgactttgcagctcatcttacacttgaacacagagcccctagagatttagatgaatcgagtggtgttcgacatgtacgtagaatgtttcaccctggccggggattaggaggtcctcgtgctcgtagatcaaacatgcactttactagcagttctactggtggactttcttcttctcagagttcatattctccaagcaatagggaagccatggatcctatagctggcagagcttttatctcagttatcaggagtgagacgttctgcaggaggacagcttaattcctctggcccttccgcttctcagttacaacaactgcagatgcagctgcagctagaacggcagcatgcccaggcagcacggcaacaactggagaccgcacgcaacgcaacccggcgtactaacacaagcagtgtcaccactacaatcacacaatccacagcaacaaccaacatagctaatacagaaagcagtcagcagactctacagaattcccagtttcttttaacaaggttgaatgatcctaaaatgtctgaaacggagcgccagtccatggaaagcgagcgtgcagaccgcagcctgtttgtccaagagctccttctgtccactttagtgcgtgaagagagctcatcctcagatgaggatgatcggggggagatggcagattttggtgctatgggctgtgtagatattatgcctttagatgttgctttagaaaacctaaatttaaaagagagtaataaaggaaatgagcctccaccacctcctctttgatgacatcccaattcgcagacaatgtcctctgtgctgtatttgccaatgaaagtggacaacaactatcttgggtttgtttggtgattgtaatttcaggtctgtcactcttgttacattgtgtacattcaaaaggaagagagaaaatatatatgataatcatttccacttaactaatttttacttctagcaggtaaatgtaggtagcagtgcaggggtgatctctgcttcctgtaccttgacatgcaaaaggctctcctaatactccacattcaaactgaagaggaaaattgaaatctctaatgaagctgctgtgtgtatttatgaatattaatgaataaaaactgcttggatggtttaccttaactactgcatgaggttttttgcagcgtgcatgagttttagtgaccttgttatttaagaagttaaatacaaggagtaaaacttaaaaaaaaaatacaaagcccaaagctttcccaaacattattcaatggttacacgacgaagtagcttttgaataatgtctgcctgaatcacctttctttgtgtgcctcctacgcacaaagccagctctgcagtggaatctggggattatagccgggtgtggcactccgccctgtgtgactgtcctgtcgccctgttagtcatcttgcctgtgtggagctcagcctgtctctttaactcatctg

SEQ ID NO: 570 - DNA, 937 bp; single-stranded, linear
  immediate source library: HNT2RAT01
  immediate source clone: 257321
ttatgatctagataattgcagaatatcattttatctgcactctgtcttcataagagagctgtggccgaattttgaacatctgttatagggagtgatcaaattagaaggcaatgtggaaaaacaattctgggaaagatttctttatatgaagtccctgccactagccagccatcctaattgatgaaagttatctgttcacaggcctgcagtgatggtgaggaatgttctgagatttgcgaaggcatttgagtagtgaaatgtaagcacaaaacctcctgaacccagagtgtgtatacacaggaataaactttatgacatttatgtatttttaaaaaactttgtatcgttataaaaaggctagtcattctttcaggcgaacatctaggatcatagatgaaaaatcaagccccgatttagaactgtcttctccaggatggtctctaaggaaatttacatttggttctttcctactcagaactactcagaaacaactatatatttcaggttatttgagcacagtgaaagcagagtactatggttgtccaacacaggcctctcagatacaaggggaacacaattacatattgggctagattttgcccagttcaaaatagtatttgttatcaacttactttgttacttgtatcatgaattttaaaaccctaccactttaagaagacagggatgggttattcttttttggcaggtaggctatataactatgtgattttgaaatttaactgctctggattagggagcagtgaatcaaggcagacttatgaaatctgtattatatttgtaacagaatataggaaatttaacataattgatgagctcaaatcctgaaaaatgaaagaatccaaattatttcagaattatctaggttaaatattgatgtattatgatggttgcaaagtttttttgtgtgtccaataaa

SEQ ID NO: 571 - DNA, 366 bp; single-stranded, linear
  immediate source library: HNT2AGT01
  immediate source clone: 263518
tcaaaaggtagagccctgtntcaacccagaaacacctagttcagaacaggantccacattgccagtgacatgagactgaacagccaaatggaggctatgtggagttggcattgcatttaccggcagtgcgggaggaatttttgattggccatcccaaggtctaggtggaggtggggcatggtatttnagacattccaaaacgaaggcctctgaaggacccttcagaggtggctctggaatnacatgtntcaagctgcttggacctcgtgctttaagtgcctacattatctaactntgctcaanaggttctcgacttgnggaccacactcaagccgacttatncccaccatcccacctctggataat

SEQ ID NO: 572 - DNA, 1702 bp; single-stranded, linear
  immediate source library: HNT2AGT01
  immediate source clone: 264226
cagttagtggacccaaataagtattcagtggtatataaatatttcaggaactaggtactgaattaggtgctctgagttggcaccccgaaatgtttggaatcacgactatgatttacttaaacacgtaacacattcaaggatatataaatgggagtctaagtattttccttttgaagagaataatctatgaaatggaagacttgattttttttttcattttttagaagtaatacacatttatgattgttggcacataaaactatgcaaaataattctttttaagtatctgtaagaaagaattgggcagtttaaacggattttgcttatttatgcactacagaatgcagcatactgtattactgttgaggctgcttaataagtttaccaatgtgaaaagcagatcttgggtataagtgtatgcctgatttgagcttttaaaaactgtgcagtaggtgtatggtaatgttttacaatcctatgtagcaaaataggaaattatgaatttttgttgttattgttttaaagatttaagatggattggggtagggaacagctggagccagggtataccttctagtatgtagagggaaacaatgtttagataggaaaaaggaagccgtctgtttacagttaactttatttcatggacttctacaaaatgttgtattaatcactttttctagttcaaggaatttcaattccagggtacaaaccattgatttaaaaattacgtttccattctttttagtatcagtttaaagtaaatgcttaccatcagccagttgctgtcactgggaagaaggcaacttgaagtatttactgataaaatagcctttattcccaagtgtgacttttcttcagtgtctacatattatgtcacacgttctatttgcactgctgcaatatagatcaaagatcttgtggcataggggtaggggagtgttagtatctcccttgtcccatttgttctgttactgcttcattggactgatataccctcatgaacttgcaatcacctaaatggaagtcttgaatgtgtcaccttttgcttggttatttcaaccatgctgctatatataatcaggtgtggcacagtttgtcagtttgattataggtgtgagtggatagaaatcattacactgtgctgttaacgatccttgtctgcttgctgttacctactttttacaggcatcataataaaagctagactatttctttggggggaaagagacttatttaatgtaatttaaaaaacttttccaatagaaaatgaaatattattgaaaataatatctattttttagctttcagcaattgatggtgctttgttgtggtgtctgctggaagtctactgccattatagggaaccttgcttgttagcttctctagatctctattctaaacaatctgttagtgatgataaattctgtaggagggtctattctgagccgttaacttcctgtaaggggaaaatgggtgggttaccagaaataccattgaagcagggtgggctgtggggtggaaggttggggtatttgtcttgagaattaaaaactacgaaacacttttgtacacaactgattttttaaaaaataaacacatttttaaagatgttgaatttttccccccttattgggaattcttaaaaataaatgcatgcatgttttcccctgnaaaaaanggggagnngggggaggggggt

SEQ ID NO: 573 - DNA, 931 bp; single-stranded, linear
  immediate source library: HNT2NOT01
  immediate source clone: 270483
gaaagcaggccatacgagatgcagagcgtgtaaaggaaatgaaacgaatgcataaagctgtccagaaagatctgccaagaccatcagaagtaaatgaaactattctaagacccttaaatgtagaaccgcctttaacagatttacagaaaagtgaagaactaatcaaaaaagaaatgatcacaatgcttcattatgaccttctacatcacccttatgaaccatcttggaaataaaaaaggcaaaactgtagggtttggtaccaataattcagagcacattacctatctggaacataatccttatgaaaagttcttcaaagaagaggtgnnaagggccgctgcccaaagagacaatgaagaggaaacaacagatgatccacgaaaacttaaacctggagaaatagatccaaatccagaaacaaaaccagcgcggcctgatccaattgatatggatgaggatgaacttgagatgctttctgaagccagagcccgcttggctaatactcagggaaagaaggccaagaggaaagcaagagagaaacaattggaagaagcaagacgtcttgctgccctccaaaaaagaagagaacttcgagcagctggcatagaaattcagaagaaaagaaaaaggaagagaggagttgattataatgccgaaatcccatttgaaaaaaagcctgcccttggtttttatgatacttctgaggaaaactaccaagctcttgacgcagatttcaggaaattaagacaacaggatcttgatggggagctaagatctgaaaaagaaggaagagatagaaaaaaagacaaacagcatttgaaaaggaaaaaagaatctgatttaccatcagctattcttcaaactagtggtgtttctgaatttnctaaaaagagangcaaactagtacttcctgcccctcagatttcagata

SEQ ID NO: 574 - DNA, 1654 bp; single-stranded, linear
  immediate source library: PANCDIT03
  immediate source clone: 274605
ggaccccgaggcgcgcgcggcggcgggccgctgctcactgacctctaccaggccaccatggcgttgggctattggngcgcgggccgggcgcgggacgncgccgagttcgagctnttnttccggcgctgcccgttcggcggcgccttcgncttggccgccggcttgcgcgactgtgtgcgcttnctgcgcgccttccgcctgcgggacggcgacgtgcagttcctggcctcggtgctgcccccagacacggatcctgcgttcttcgagcaccttcgggccctcgactgctccgaggtgacggtgcgagccctgcccgagggctccctcgccttccccggagtgccgctcctgcaggtgtccgggccgctcctggtggtgcagctgctggagacaccgctgctctgcctggtcagctacggcagcctggtggccaccaacgcagcgcggcttcgcttgatcgcagggccagagaagcggctgctagagatgggcctgaggcgggctcagggccccgatgggggcctgacagcctccacctacagctacctgggcggcttcgacagcagcagcaacgtgctagcgggccagctgcgaggtgtgccggtggccgggaccctggcccactccttcgtcacttccttttcaggcagcgaggtgccccctgacccgatgttggcgccagcagctggtgagggccctggggtggacctggcggccaaagcccaggtgtggctggagcaggtgtgtgcccacctggggctgggggtgcaggagccgcatccaggcgagcgggcagcctttgtggcctatgccttggcttttccccgggccttccagggcctcctggacacctacagcgtgtggaggagtggtctccccaacttcctagcagtcgccttggccctgggagagctgggctaccgggcagtgggcgtgaggctggacagtggtgacctgctacagcaggctcaggagatccgcaaggtcttccgagctgctgcagcccagttccaggtgccctggctggagtcagtcctcatcgtagtcagcaacaacattgacgaggaggcgctggcccgactggcccaggagggcagtgaggtgaatgtcattggcattggcaccagtgtggtcacctgcccccaacagccttccctgggtggcgtctataagctggtggccgtggggggccagccacgaatgaagctgaccgaggaccccgagaagcagacgttgcctgggagcaaggctgctttccggctcctgggctctgacgggtctccactcatggacatgctgcagttagcagaagagccagtgccacaggctgggcaggagctgagggtgtggcctccaggggcccaggagccctgcaccgtgaggccagcccaggtggagccactactgcggctctgcctccagcagggacagctgtgtgagccgctcccatccctggcagagtctagagccttggcccagctgtccctgagccgactcagccctgagcacaggcggctgcggagccctgcacagtaccaggtggtgctgtccgagaggctgcaggccctggtgaacagtctgtgtgcggggcagtccccctgagactcggagcggggctgactggaaacaacacgaatcactcacttttccccac

SEQ ID NO: 575 - DNA, 2171 bp; single-stranded, linear
  immediate source library: TESTNOT03
  immediate source clone: 275010
attggcgccccctgaggtggactttgacaggntgctggccagcctgcaggatcttagtgagctggtggtagagggtgacacccaagtgacaccagtgcccggcggggcaggctgcntaccctcgancccatcncgcngaanctctaccggaatggcatcatgatgttcnangggcccttcnagcccttctacganccctcnaaanaangctacctccnanaacatattgaatggcttctntccctcaganctccaacacagcgctgcctccgagacatattggatggcttctttccctcagagctccagcgactgtaccccaatggggtcccctttaaggtgataagctgctcctcaaaccacacctttggggattttgaagggagtggggatacacagcctccccagacacctcccattctgaggggaagccgctgcactccctgggggaccccagtctgatgccctccaggaggataagtctgaagccgggctgggaagggagcggagaggcccgaaacagagcagcaggcagcgccctctgctggcaccctggagacagcctcggctgcggggcccctgccttctagtcctccccagctttcaggacaccttgacaacctggggtccctgcagaagtggcccggctgtcccccaagtctcctgaagctatctgggtagggtgggaggcagcaggggctttgtcctctcctgaccccctcacactctgccttcacggtaggctcctgaaaggggggtctccaaggagggtgtcagtactgcagcttcagctggcgtggatggggtgcttacaggagcagcagggctgagggagatgacagcagtacgaaccgtggctctcctgaggcctgggtttcctcatatgtaaaatgggggttgcattagaccatacccttggcctgtgtttaggcaaatagggatgaaagtggggccaagggctgaagagctgggtccgctgccgtcgttgcccttcttttttgccaggtgagtgacttgcgcaatcaggtctacctggaggattagactggaccctttcccaggcgaganaaccgtgttgtnngcaggcagcggatgnacaaggcctttgnncaatgnntnganggagcacccanggnttccaggnttttgacagccaagaagttctggaagccaggggactcattggcgccccctgaggtggactttgacaggctgctggccagcctgcaggatcttagtgagctggtggtagagggtgacacccaagtgacaccagtgcccggcggggcaggctgcgtaccctcgagcccatcccgctgaagctctaccggaatggcatcatgatgttcgacgggcccttccagcccttctacgatccctccacacagcgctgcctccgagacatattggatggcttctttccctcagagctccagcgactgtaccccaatggggtcccctttaaggtgagtgacttgcgcaatcaggtctacctggaggatggactggaccccttcccaggcgagggccgtgtggtgggcaggcagcggatgcacaaggccttggacagggtggaggagcacccaggctccaggatgactgctgagaaatttctgaacaggctccccaagtttgtgatccggcaaggcgaggtgattgacatccggggccccatcagggacaacttgcagaactgctgcccattgcctgcccggatccaggagattgtggtggagacgcccaccttggccgctgagcgagagaggagccaggagtcacccaacacaccggcacccccgctctccatgctgcgcatcaagtctgagaatggggaacaggccttcctactgatgatgcagcctgacaacaccattggggacgtgcgagctctgctagcgcaggccagggtcatggatgcctctgcctttgagatcttcagcacattcccgcccaccctctaccaggacgatacactcacgctgcaggctgcaggccttgtgcccaaagcagcactgctgctgcagggcacggcgagccccgaagtccagcctgaaattcagtcctggtccctgtcccggtcccggtcccggccccagttccggtcccggtcccggccccagtccctgtcccggacccagtcccagcccccaataaagcacccgncccctcaa

SEQ ID NO: 576 - DNA, 658 bp; single-stranded, linear
  immediate source library: BLADTUT08
  immediate source clone: 2804907
aaagaaaagaagaaaaatatctaatttctcttggcagatttgcatatttcatacccaggtatctgggatctagacatctgaatttgatctcaatggtaacattgccttcaattaacagtagcttttgagtaggaaaggactttgatttgtggcacaaaacattattaatatagctattgacagtttcaaagcaggtaaattgtaaatgtttctttaagaaaaagcatgtgaaaggaaaaaggtaaatacagcattgaggcttcatttggccttagtccctgggagttactggcgttggacaggcttcagtcattggactagatgaaaggtgtccatggttagaatttgatctttgcaaactgtatataattgttatttttgtccttaaaaatattgtacatacttggttgttaacatggtcatatttgaaatgtataagtccataaaatagaaaagaacaagtgaattgttgctatttaaaaaaattttacaattcttactaaggagtttttattgtgtaatcactaagtctttgtagataaagcagatggggagttacggagttgttcctttactggctgaaagatatattcgaattgtaaagatgctttttctcatgcattgaaattatacattatttgtagggaattgcatgctt

SEQ ID NO: 577 - DNA, 1689 bp; single-stranded, linear
  immediate source library: EOSIHET02
  immediate source clone: 285202
gtccgggggtttgtgggagttgccttgacctgcagctccgccaccgcggacccgccttctgccctcagcagcagacgctctgtcccgcccgggcagctctgcgaggcagcggctggagagggaaccatggggactgtgcacgcccggagtttggagcctcttccatcaagtggacctgattttggaggattaggagaagaagctgaatttgttgaagttgagcctgaagctaaacaggaaattcttgaaaacaaagatgtggttgttcaacatgttcattttgatggacttggaaggactaaagatgatatcatcatttgtgaaattggagatgttttcaaggccaaaaacctaattgaggtaatgcggaaatctcatgaagcccgtgaaaaattgctccgtcttggaatttttagacaagtggatgttttgattgacacatgtcaaggtgatgacgcacttccaaatgggttagacgtttacctttgaagtaactgaattgaggagattaacgggcagttataacaccatggttggaaacaatgaaggcagtatggtacttggcctcaagcttcctaatcttcttggtcgtgcagaaaaggtgacctttcagttttcctatggaacaaaagaaacttcgtatggcctgtccttcttcaaaccacggcccggaaacttcgaaagaaatttctctgtaaacttatataaagttactggacagttcccttggagctcactgcgggagacggacagaggaatgtcagctgagtacagttttcccatatggaagaccagccacactgtccaagtgggaaagcgtatggcgagaactgggctgcctctcaaggacggcgtcatttgctgttcgaaaagaaagcggacattcactgaaatcatctctttcgcacgccatggtcatcgattctcggaattcttccatcttaccaaggagaggtgctttgctgaaagttaaccagggactggcaggctacactggcggggatgtgagctttcatcaaagaagattttgaacttcagttgaacaagcaactcatatttgattcagttttttcagcgtctttctggggcggaatgttggtacccattggtgataagccgtcaagcattgctgataggttttacctcgggggacccacaaggcatccgcggattcagcatgcacagcatcgggccacagagcgaaggagactacctaggtggagaagcgtactgggccggcggcctggcacctctacaccccattacctttccggccaggccagggtggctttggagaacttttccgaacacacttctttctcaacgcaggaaacctctgcaacctcaactatggggagggccccaaagctcatattcgtaagctggctgagtgcatccgctggtcgtacggggccgggattgtcctcaggcttggcaacatcgctcggttggaacttaattactgcgtccccatgggagtacagacaggcgacaggatatgtgatggcgtccagtttggagctgggataaggttcctgtagccgacacccctacaggagaagctctgggactggggcagcagcaaggcgcccatgccacacaccgtctctcgaggaaacgcggttcagcgattctttgactgcggaccctgtgggaaaccccgtcaataaatgttaaagacacactccg

SEQ ID NO: 578 - DNA, 861 bp; single-stranded, linear
  immediate source library: EOSIHET02
  immediate source clone: 287240
aacagcaacatacaggtcctttctgaaagatctgctactgaagtagacaacaattttagcaaaccacctccgtttttccctccaggagctcctcccactcaccttccacctcctccatttcttccacctcctccgactgtcagcactgctccacctctgattccaccaccgggtattccaataactgtaccacctccaggttttcctcctccaccaggcgctccacctccatctcttataccaacaatagaaagtggacattcctctggttatgatagtcgttctgcacgtgcatttccatatggcaatgttgcctttccccatcttcctggttctgctccttcgtggcctagtcttgtggacaccagcaagcagtgggactattatgccagaagagagaaagaccgaggacaaaagtcaaaggagtagaccttgatgcacctggaagcattaatggagttccactcttagaggtagatttggattcttttgaagataaaccatggcgtaaacctggtgctgatctttctgattattttaattatgggtttaatgaagatacctggaaagcttactgtgaaaaacaaaagaggatacgaatgggacttgaagttataccagtaacctctactacaaataaaattacggtacagcagggaagaactggaaactcagagaaagaaactgcccttccatctacaaaagctgagtttacttctcctccttctttgttcaagactgggcttccaccgagcagaaacagcacttntcctcagtctcagacaagtactgcctccagaaaagccaattcaagcnttnggaagtggcaggttcgntatgggagggccgaatcacctgatt

SEQ ID NO: 579 - DNA, 1331 bp; single-stranded, linear
  immediate source library: EOSIHET02
  immediate source clone: 287586
gaagtacttctgcagccgaatccagcagcaggcagaaaccacctctgaggagctgggggctgtgacagtcaaggcctcctaccgcgcctctgagcagaagctgcgtgtggagctgctcagcgcctccagcctgctgcccctggactccaatggctccagcgacccctttgtccagctgaccttggagcccaggcatgagttccctgagctggccgcccgggagacccagaagcacaagaaggaccttcacccattgtttgatgagacctttgaattcctggtgcctgctgagccgtgccgcaaggctggggcatgcctcctgctcaccgtgctggactacgacacgctgggggccgacgacctggaaggcgaggccttcctgccgctgcgtgaggtgcccgggctgagtggctctgaggagcctggtgaggtgcctcagacccgcctgcccctcacgtaccccgcacccaacggggacccaatcctgcagctgctggagggccggaagggtgaccgagaggcccaggtctttgtgaggctgcggcggcaccgggccaagcaggcctcccagcatgccttgcggccggcaccgtagccgtagaggtttgcggtggggctgggtccccggtggggacttgcaagggctttcctgtagggtctggggcttccccgccacatcgcggccctccagcctggcctaacacttggggagccccagcatgcggagtgcccagagtgcagacctcccctgcctcccatggtgatgggggctcagcagcgacatctctactcccgcctccctgcctccagccctggctgcaatgtctctaccacatcccagcaccagggggagcaaaccctgcccctgcccgcctctcagaaaagctgctgtggtgggcaggggattgggccatctgtctcctggccctggcccatctgcctcctggccttcctgttccagccactggggtgggggccaggttcactgggaccagggctacaggcacagagtctcctggaaaagggagaggggaccctgccaaagatgaggctccagctgccctggggggagggtggtggccattactagagggggcctgggtcctctccccaggggctgccagcatccaggccaggaagcctggagccaagaaccttctggctctgagggagcaagagctggcaggcggcagggctggcacagacagacggaagcagaaaggacagtttggctgctgtgtctgctgcgcacgccccctccccggacagcacctgccacctagaaactttcttagcaaaaaaattaataaaaacaaatccattgtcctctt

SEQ ID NO: 580 - DNA, 1250 bp; single-stranded, linear
  immediate source library: EOSIHET02
  immediate source clone: 288492
gcccagacagctggngggaaggaggtgtcaggcggggagagacgcaaacggcgggaccagcagcgacggtagcagcagcatggccgcgatctatgggggtgtagaggggggaggcacacgattccgaggtccttttagtctcagaaggatgggaagatcctggtcagaagcagacggactgagcacaaaccactggctgatcgggacagacaagtgtgtggagaggatcaatgagatggtgaacagggccaaacggaaagcaggggtggatcctctggtaccgctgcgaacttgggcctatctctgagcggtggggaccaggaggacgcggggaggatcctgatcgaggagctgagggaccgatttccctacctgagtgaaagctacttaatcaccaccgatgccgccggctccatcgccacagctacaccggatggtggagttgtgctcatatctggaacaggctccaactgcaggctcatcaaccctgatggctccgagagtggctgcggcggctggggccatatgatgggtgatgagggttcagcctactggatcgcacaccaagcagtgaaaatagtgtttgactccattgaccaaccttagaggcggctcctcatgatatcggctacgtcaaacaggccatgttccactatttccaaggtgccagatcgggctagggatactcactcacctgtatagggactttgataaatgcaggtttgctgggttttgccggaaaattgcagaaggtgctcagcagggagaccccctttcccgctatatcttcaggaaggctggggagatgctgggcagacacatcgtagcagtgttgcccgagattgacccggtcttgttccagggcaagattggactccccatcctgtgcgtgggctctgtatggaagagctgggagctgctgaaggaaggttttcttttggcgctgacccagggcagagagatccaggctcagaacttcttctccagcttcaccctgatgaagctgaggcactcctccgctctgggtggggccagcctaggggccaggcacatcgggcacctcctccccatggactatagcgccaatgccattgccttctattcctacaccttttcctagggggctggtcccggctccaccccctccaagctcagtggacactgggtctgaaaggaaggagtcttttgcttcctttctcctttttacaaaaacaaacatagaagaaaataaatgcactttatccactccc

SEQ ID NO: 581 - DNA, 2008 bp; single-stranded, linear
  immediate source library: TMLR3DT01
  immediate source clone: 289171
gggaggagcagctggggagggaagctggaggcactcgggagcccaagctcagcctgaagaagtcccactcgagcccgtccctgcaccaggatgaggctcccaccacggccaaggtgaagcgcaacatctcagagcgcagaacctaccggaagatcatccctaagcggaaccgcaatcagctgtgaagccagcaccacctcagagacactgttccctgctccagggtagacctgagatgaacctccctggaggagacttatttcaatgagtccaccatgacggatgaggcacctcctttccctgctgaaggacaaaccttgtttccctgtggccctcattcttgtgctccctgaagctttcctaatattgctgtgctccccaccacccccatggcagtccctccgcagccccagtccctggccacgcccaagggaagagggaggtgaggacttgactttcctcccagagctcagcccatgtcaccctccaggccccagaatccagagtggcctcatttcctagacttgctgagaactcagcacttgtttgagaaccagtgcttatgtggtgtgcccttggcttctgggggagagcttggggcagcagaggcccctgggcagcccagccaggggagccacagccccgaggatggtcttgctctgggaattaggtgaccttcctggggaggccccaggagagtgaatcagggactcttgagaaattcctaaccagcctcctgtgacccagggagcagggtcgctaaggtcctgcccactgaggggacagccttctgggcagggacctcggggggcttcaagggctctgcacggctgtggggccctgtgcctttgtctccttgtgtctcctttcccccgaagtagatgaaacagtctcacatacccaactgctcatcaacagagcagagctgatggcatgagtgagggctgggcggggtggggcctccagagctttgcagggaaccctgggaaccctaggaacaaggagcctttgttccaacagagcagagaaggaggttctctatgttcagaccactggagaggatagagaggtaaaaggtggcgacagtttcccttaggggtctgcctggcaggagccacagctcaggagagttgtgagggatgggacggaggctggcgaccaggcgaggcctaggccaggctcgggagacttttctgtgctcctttctacacatgccttaaaccttccttcctgtggggtgcctgggaccccttccaccatctctggcagctcagagggtctctgcctgctctcccctggggaaatcccctcatcctgccctctggctgcctcccagctgggcttgttctctgagggaggttccggagactcatggacttggggctctgcctgtaggaaggaggctgggccggagggaccagccaccattgtctctgttcagccaagtgtgcaagtaggctgcccgccaagagggggcctctgctacccgctgctgcctgccggctgacacactgcctccccagccttcctgctaggccaccctcctcccttcccatgcttgtaaccagctctggggcttgcacctccacaaagtaaggttggcccttggaggccatgtttgggtctccggccagggcctagggctaggccatgcacccaatgggtgcacaataaataacaggtcaacaaagagggaggtgtgtcagtgtgtgaggaagggaggtcaggcagctaggaccacctgcagtgtggcaggcttcatccctctttgctccaagtgtgtatgtgtgtctgtgcatgtgtgtagtgtctgtgtctgtgtgttcatgcatatgcaggagtcacacggtcataggccatcaaagctggaggagacctcagaatcattcattcacctacttgcnnnnnnnnnnnnnnnnnnnnnttgcagataatatgggacgctttctatgtgccagtaccaggggattcacaaatgaattaaacatgtccctgactccaaaaaaaa

SEQ ID NO: 582 - DNA, 781 bp; single-stranded, linear
  immediate source library: TMLR3DT01
  immediate source clone: 290214
aggaagccggggagacaggtggggtactcgggaagctggagcgggccggcggtgcagtcacgggggagcgaggcctgctgggcttggcaacgagggactcggcctcggaggcgacccagaccacacagacactgggtcaaggagtaagcagaggataaacaactggaaggagagcaagcacaaagtcatcatggcttcagcgtctgctcgtggaaaccaagataaagatgcccattttccaccaccaagcaagcagagcctgttgttttgtccaaaatcaaaactgcacatccacagagcagagatctcaaagattatgcgagaatgtcaggaagaaagtttctggaagagagctctgcctttttctcttgtaagcatgcttgtcacccagggactagtctaccaaggttatttggcagctaattctagatttggatcattgcccaaagttgcacttgctggtctcttgggatttggccttggaaaggtatcatacataggagtatgccagagtaaattccatttttttgaagatcagctccgtggggctggttttggtccacagcataacagggcactgcctccttacctgtgaaggaaatgcaaaataaagcatggattaagtgagaagggagactctcagccttcagcttcctaaattctgtgtctgtgactttcgaagttttttaaacctctgaatttgtacacatttaaaatttcaagtgtactttaaaataaaatacttctaatggncanagcctnaagattactaaannanaaa

SEQ ID NO: 583 - DNA, 1177 bp; single-stranded, linear
  immediate source library: TMLR3DT01
  immediate source clone: 290510
tattttttgaagtgggcatggttggctctttgaagacctataaagagatccagtgggaagagtaagggttggttcatcatcacaagaaataaaaaacatagtgattttttctcttaatgtgtagaggtggttttactggcaataattaataatagatttctatttcagtatgtaagcatattaactaaaatatgaattacacttccaaagttagatttctgcttcagtaggtttgtttgctgtgaagattacttctcaaaagacagatgttcatattagcttaattttcggtttaaatatgtttgtaaatgatgtaatatatttcttttgactaaatgtggaaaagtaatgtgtgttatacattgagaagtttttactggctttgactggaggttgtttttgcagagatggtattttatatgattccagtatttggaaaagaattagtcaaaaggaattcacatagtttaaatactgagaaattaatatccaaatatgtacttgtctgatttctaaataagctgggggaggagggaggggtgggaattgaaatgtgcaaatgagtagtgaatgctacactcattttcaactctttaacatgaaactgttcaatcttaacacattgttactttaatatatgtataaagaagtattactgtttgtaaagctgctgtttgcttaanaaaaaaaaacacccttgtcatgtattttctgtatgttgggccaacaggttagaaacatcaactcatttaaaaatttttatctttttttgatttaaaaaaattctgtgaaataatttatttacagacatcttcctcctccctcatcccttccaacctttacatacatcacagaatcaaccaaactgtttgcctaatctgaaatctgaatcctaatgagaaaaatttaaattttgttggcacatcacaacttgaaagtatttgtattattttataatttaatttctaaatataccacataagtttataatttaatgtcttaattgtaatgctctaataaaaaactagcaaaattagtgtgagttataacatgaagggattttcatcttttgctgtatgaaggataattgttatatcacatttggggggtaataacagcttttttgcnctatgtaaatactagtggggattcttctgtactaataaaatgattattg

SEQ ID NO: 584 - DNA, 132 bp; single-stranded, linear
  immediate source library: TMLR3DT01
  immediate source clone: 290628
gaatttatttgttcctagaaaaactttgcactgaaaatgttttcttaaaaacatcatagatgttcaggaatgtgaaaaataaatcacttcgaaatagcatttagaaaccccttttataaatattattatttt

SEQ ID NO: 585 - DNA, 279 bp; single-stranded, linear
  immediate source library: TMLR3DT01
  immediate source clone: 291736
ggaaaaggaaaagtaaaatatttggcagaataaaaatgttttttttggtaatgaagcctttagaaaactaaagttaaatgaaaaaactgaagtagaactaaactcttacgtcttaggagaacttagatacatatgtgtcagagtctgactgtatttatattctaaacacacatatgatcacacaacatacatacagagactatttgtataactgtaaatagatgtgacgtatgtataacttaaaaatcttttgataggtcacagtcgaactgttattgg

SEQ ID NO: 586 - DNA, 2233 bp; single-stranded, linear
  immediate source library: THYMFET03
  immediate source clone: 2918759
atctagagccaaaaactttgatgttatttagcctgcattttgcctagttcttggcagtcttgttaacatttggaaataggaaagctggtgtatccattgaggaccctttaggcctaagagcccagtctgagaaccctggaattgaggagtgggagaaaggaaaggaccaggggcttgagacatgaccaggaagccaaccaccccattatttgagagcttgcggtctcagaggctcagaggattagggtctgtggcttcaaggccataccatggagcggaagggacctcagaacctacctgtctagccccttgctttgtagatggaaaaactgagtccaagagagggtgtcagccagctggggagtggggaggattggagcagggccaggcctgacacactgctttcttgttctctctctttctctcccctntccctcttcctcatcttcttcccctctctccacagtttacttcagcacttaaatccccgaggagtctgccctgcctagagaagggcctctcccccaaccctcagccgttcctccacctctcagccatatctttcagcccccccctcccctggatccnnnnnnnnnnnnnnnnnnnnnnnnnnccccctgtaaatagccagctgttatttatacatatataatattatatatatttggtctgtttgtagttttattactagatgatttttccggttgtccttaacaccccttcctgaagggttcccttcacccctctctcttgccttccttccctttccctttcttcctgactagccccaagtcccttcatttgcatctgctatgcaatagtccctctcctttccttcttcttccctcagatttagctgatccttcctcccaccctggccttcctttcctctttcctcctcactctccccgtcatgctccctctgccccgccctcaaaannaaaaaagaanannnaaaancaanagcacctgtccaggcttccttaggtacatcttctttgtagccattgggaggctctgagactggccccacttggtcctaagaatcccaaggtctttgggagcgtccagcatgttaattagcgtatcattacatactgctatccctttccatttctttttgttccatcactcttctctcaacctgtgtttctttttttactgaggagttagtccccattagttcttgtatcacattttcatttgcacgacattactcgcaggtggtggggaggcctngngggcttttggggaaccaggctgctctggtccccagcattgcctcctcctagcccctctagtccagttttgcctcccttaccctcattttccaaacctcttgtaccctcctctccctcccccagctggtatgtaagtgtcttgaagttcagtatgttatgatggaccaataattctgccacttcgggtttctccctacattcctgctccccagttttcatgtggggtactcaactgacattcccatggggtttccctcccatctgcctgatccacctcctcctcccaccaggagagttgggggttggccacaattgatctcttgtgagaggggtggctaccagtgtgtgtgtgggggtcatcactgccttggggaggagtggggcagggcagagaatccccccaattcctgcctgaaatctctggcctcaacccctgctgggggttggactgaaaaccctcctccccaatttggggggtgttgccccatcactgcccagctcctctgactgccccccctgaatttagggtgggggtactagtcactgccaatgtgtgtatgggacttgctggaaaacggggatgcttgcccctctccaggactattgagcccagagagagctgtcctctcattgggtgaactgattgaaggaagggtctattgtctttttaaatggcacaattttaagggtttgagggtacagtcccttaacctgccacgggagggggcccccaaactttcttctccccacacttctggttttctgtgtggagggggagcagggatatctaagctgtggtgtgaaagggtaggagagatgctggaggtgggggtgctgtgttttacagcccccatattatcccagtgtcccctgcccccctcttcccccaccccatgcccccaattctgtggcgcatccagattgtgaaaatgtacaataaatgtgtaatgagtaaccaaaaaaaaaaaaactcgtgccgaattcggcacgag

SEQ ID NO: 587 - DNA, 1002 bp; single-stranded, linear
  immediate source library: SININOT04
  immediate source clone: 2922560
acagcttttaattgcttgatttatactttattaaagagaggaagcacaatgagcagtgatactaaaatataactaatatggcatgtgaaagtgatcattattcagatgatcttcaccaacactgcatttgcatatatctgaccaaactttatgcgacataggcaggtctctggcacttcaaaaatgaatgttaaatagaaaataataaataatagctgattagggtaatcatttatttaatcagaataaagattatatccataaaatttacttgcagagaagtacnnnnnnnnnnnnnnnnnnnnnnnnnnnnnnnnnnnnnnnnnnnnnnnnnnnnnnnnnnnnnnnnnnnnnnnnnnnnnnnnnnnnnnnnnnnnnnnnnnnnnggatgatcctcctacttcaggaattatgccaccatggcccggctagttgagaagtactttcaaatagcaacatgaagcctttcctttaccatttgaaaataaaacatagttgtaaacataaaccagtatgtctttgtaaagccaataatatatcattttataggagcattgtcttcttgtgtttttcaagttgactatgtagttcaatgtcagtctccattttaatatcttgtttgtttatcagcctgagcatatttcattttaaaatgtatttgttgaggaagtcatggtggttttttgtttttcacaagtcaagtagcttgaacactatcacttgtccaatgggaaagttgatgcttatctttatgggcaaatgcttggttgaataatatatttgcaaagatgttaattctacagagagctaaataaagttaagatacctgtaaaacagtttctccagatgactttaaaataagccttatttttgtaaatttatgttaaattttaggtgttaagttgtgaaatacctaatgatgtgggcctaaatttgcctcattcagactgagacagggctgttaaaattcatttctagctaataaactgtgctataacttct

SEQ ID NO: 588 - DNA, 2440 bp; single-stranded, linear
  immediate source library: SPLNFET01
  immediate source clone: 29244
accagaccctggtaaccactatttgactttctttctgatttcccttcatatgagtgggatcaaacaagagttgtccttttgtgtttagcattcttacttagcaagccatcaactgctcgaacagtcactggggcaactacttttcgcccagtgtcctccagaaaagaaagatctggagggtcaggccactctttttcttcaaaataatggggtgcagaagggtagggatgaacctcttcctcctttgccactttagctttagctcaaaggaactccaactttttattatttgcaacagttagttagctttctttgtttcacatctctgccttgcagaaccatgacctatcaaggtgttttgtcaaacaaaaactaatactttccctgggaaaaagccatgtggtagcaagtaccagaaatttttatggccaaataatacaccactatatccatagaccgcatttggaaggacttatggcatgtaaacattatttataaagtaagtcatggttataattatttttctcctgcctccttatgtatttatttcagaaatgagccgtcagactgctacagcattacctaccggtacctcgaagtgtccaccatcccagagggtgcctgccctgactggcacaactgcatccaacaatgacttggcgagtctttttgagtgtccagtctgctttgactatgtgttaccgcccattcttcaatgtcagagtggccatcttgtttgtagcaactgtcgcccaaagctcacatgttgtccaacttgccggggccctttgggatccattcgcaacttggctatggagaaagtggctaattcagtacttttcccctgtaaatatgcgtcttctggatgtgaaataactctgccacacacagaaaaagcagaccatgaagagctctgtgagtttaggccttattcctgtccgtgccctggtgcttcctgtaaatggcaaggctctctggatgctgtaatgccccatctgatgcatcagcataagtccattacaaccctacagggagaggatatagtttttcttgctacagacattaatcttcctggtgctgttgactgggtgatgatgcagtcctgttttggctttcacttcatgttagtcttagagaaacaggaaaaatacgatggtcaccagcagttcttcgcaatcgtacagctgataggaacacgcaagcaagctgaaaattttgcttaccgacttgagctaaatggtcataggcgacgattgacttgggaagcgactcctcgatctattcatgaaggaattgcaacagccattatgaatagcgactgtctagtctttgacaccagcattgcacagctttttgcagaaaatggcaatttaggcatcaatgtaactatttccatgtgttgaaatggcaatcaaacattttctggccagtgtttaaaacttcagtttcacagaaaataaggcacccatctgtctgccaacctaaaactctttcggtaggtggaagctagacacatgaaggtaaataaaaagaaaggctgttaaatacaggaaacagttgcatgtagtaacactaatatatttaaaaataagtcaacagtaaaccactgaaaaaatatatgtatatacacccaagatgggcatcttttgtattaagaaaggaagcattgtaaaataattctgagttttgtgtttgttgtagattgattgtattgttgaaaaagtttgtttttgcgtgggagtgtgtgcctgcgtgggtgtgtgcgtgtttgggtttttttcctttaactgacaagccatcttgagtggtcatgggccactgcttttccctttgtgagtcaatacatagtgctgctgtgtgctttttttgtgtgtatttgctaatttttattaattttagtttttcattaaataaatttgacttttctgtaattnaggtttttnctttttttgtaccattttaaagttagtatcttttgatatgcatatttgtttatggtaaaaaatttataacgtgttcaatattttcttttcccccattaatcagttcattagaaatattttaaaatcagctattttgtgaagccatgagttccagaaagtaaaggtgacatcggaaaaataatcaaaagctatttaaagcatctataaggtgctctctttctgtcttctacagatgagtcacacctttgagcttaatctttgaaaggttagagaataaattgatttttataaatactgcaaatcaggcttttgtttcctttttcagatatcttggacaaatcacatattttaaaatttgttcttgtatttattggttttgcagaagaaggcatcgtcatgcacagtatttgtaattaaaagcaaatcatttgtttaaaaaggcagtttgcaaaaaatgtttttggtcttttataattctcattaaaagaatntctggc

SEQ ID NO: 589 - DNA, 1316 bp; single-stranded, linear
  immediate source library: TMLR3DT01
  immediate source clone: 292708
gtcattctacagtgtttcagatgacaatgctccctctccttatatgggtgtgattactttagagtcccttggtaaaaggggttatcgagtacctccttcaggaacaatacaagtgaccttatttaatcctaataagactgtggtgaagatgtttgttgtgatatatgatttacgagatatgccagccaatcatcagacattcctacgacaaagaactttttctgtacctgttaaacaagaagtgaagagaagtgttaataaagagtaaacaagaagtgaagagaagtgttaataaagagaacatccgacacacagaagaacggttattacgntacctcatacatctgaggttccagagttctaaatctggaaagatctacctccatagagacgtacggctcctgttctctagaaagtcaatggaggttgatagcggtgctgcatatgaactcaaatcttacactgaatcaccaacaaaccctcagttttcaccaagatgttgataaggagtgatgatttaaagtatttactcagtacccaagtttgcaagtaaaaattagcatagaatggagtgtaccaaattaacaatcaggagagtggattctctcctgttatcctggaccagtttttatgaaaggattcctgaaatgaaatccatatattccatgtagactggaaaaactcatgtcctaatcctttttgtactgttgaaaccacttcattggacatgttgcaatagcaaaacccccagttaggattagtgtttacacattttctcagttatttaatatttaatgttttccttaatactcaagtggatgtttgtctctagtgttctaatgtagcacaaatcctatgtaaaatcatactatgtatttttgacattaatgttgaaatcaaatatatgcacaagtctttaattttgtgtaatgtgttaagtgctgttcatttaagttattgaaaatgagaataaaatgttgagcttctttaaaagtaacacactatgcaagcatgtgtactttttatatctctcatgtttagtttttataacaccatatccaggttgctatctcacatagtagtcctttaacatattgtattagcagtgcaatgtggactaagctgcttcactttccctttgcaagttcagatcatcatgcccattcatagccaggattccttatccccaaaacagttctatttttccttaatcactactatagagtctttacattaaattactgtcgtatgctagataattttctcaaattgttaaaagaatatgtactttggaaacaaattagtatttatattgt

SEQ ID NO: 590 - DNA, 903 bp; single-stranded, linear
  immediate source library: BRSTNOT16
  immediate source clone: 3038216
taataccatgctgttccagtaagaaatagaacaaatcatagttacttaaactctttaaaaataaatagctatttattcctctgaaaagtattttaaggttgggggcctttatacataaatgcaacttttgagattacctttttttctttgtgtgtgtgttttaggtttggctctttaaccatggatggtggccttcgcaacgttgactgtctttagctttctaatagaagtttaagaaaagtttccgtttgcacaagaaaataacgcttgggcattaaatgaatgcctttatagatagtcacttgtttctacaattcagtatttgatgtggtcgtgtaaatatgtacaatattgtaaatacataaaaaatatacaaatttttggctgctgtgaagatgtaattttatcttttaacatttataattatatgaggaaatttgacctcagtgatcacgagaagaaagccatgaccgaccaatatgttgacatactgatcctctactctgagtggggctaaataagttattttctctgaccgcctactggaaatatttttaagtggaaccaaaataggcatccttacaaatcaggaagactgacttgacacgtttgtaaatggtagaacggtggctactgtgagtggggagcagaaccgcaccactgttatactgggataacaatttttttgagaaggataaagtggcattattttattttacaaggtgcccagatcccagttatccttgtatccatgtaatttcagatgaattattaagcaaacattttaaagtgaattcattattaaaaactattcatttttttcctttggccataaatgtgtaattgtcattaaaattctaaggtcatttcaactgttttaagctgtatatttctttaattctg

SEQ ID NO: 591 - DNA, 1536 bp; single-stranded, linear
  immediate source library: HEAANOT01
  immediate source clone: 3043265
gcattgttttaattgagaggggcagggctggagaaggagcaagttgtggggagccaggcttccctcacgcagcctgtggtggatgtgggaaggagatcaacttctcctcactctgggacagacgatgtatggaaactaaaaagaacatgcggcaccttaagagtggggaaggtgagtggtagagagggggtctctgaaggcccttggggctgacagggccaggcagcctccccagctgaggcatcattcctgggccagagtcgtgtccaccaagggacagtagccagagctcctcttcctttaccaggcaaggtgcatcccctcagccctcctggcccttcagtcttggtgccacctgggcacaggggcaagcttggtggttgtgagtccattcatctatcagagctggaacctcatccctgcacagatgaggaaaccaaggcatggagcagttcccagagtcgaatctagatctcatctgtcatccgggtcttatcctttgctctgtttttctcttcaggctctggaaaatcagatctgtgacttaatcttcctctccctggccctcacccacttagtttctttttcattcctgctccctgccttaactcctcctcccactgcccctgatcccaggcccaggcttttacaacctggtgctcagcttccccatcagtgaaaaggggtggctagagtaactaacctcagcagggncgtccagtcctgatagtctgtggatttcggatccttctcaggaagcttcatgtctaattggagactttaattataactcctgttctgcatagagcatttgcatcaaaggcttcccctccctcccctggtcctcataagatccttgaagcaggttcctattcctcattggcaacatggcaaacagatcacaggagtcaaagggccttgctcaaggtccccagcttcagccccaggccctaagccagcgtcagaacagtcaatctgcatttttcatcagtcattctatagtgacatcatcccagactgccttctgtattcccctgtgtacagtctccttctgtttctaggtttagaagttcagaggtgactgtgtttctccatttccacagccaaatgggggaagaggtgaggctaggggagtgctgtgctgattctccagccatggtcagacaggtcacccaggagcctcgaggaaagccctggagggaatcacatgtgtaactttttcatgaagctttttgcaaagcacatctgtgatacactagtttattgaactaatgtccaggagtagacatgattggtggccaagttatttggggacacctaaacagatcagtgacctgaatgacttctcagaacctttaatatgccaatgtgtgtggcaaacttacaagaagggagctaagtatccagcctctcccaaacctctttgaacaaagcttctgtccctcccacacctctcacctcacaggcacatcaggctgcagaatgcgctttagaaagcattgttttagtccaggcacagtggctcacgnctgtaat

SEQ ID NO: 592 - DNA, 1128 bp; single-stranded, linear
  immediate source library: HEAANOT01
  immediate source clone: 3044325
ccacgcttggctaagaacacctaaatttttatgtttcttggctcaaaaaccagttccatttctaatgttgtcctcacaagaaggctaattggtggtgagacagcaggggaggaggaagagctgtggtttgtaacttgttcaactcaggcaataagcgattttagctttatttaaagtcttctgtccagctttaagcactttgtaagacatggctgaaagtagcttttctatcagaattggcagatagtcatgttgggctaacagtcaattggatatattcctttacctcacatgaccccagcaactgtggtggtatctagaggtgaaacaggcaagtgaaatggacacctctgctgtgaatgttttagagaaggaaattcaaaaaatgttgtaactgaaagcactgttgaatatgggtatcggctttctttttcactttgactcttaacattatcagtcaacttccacattaatgaaagttgaccatagttatttccaaataaaaagaaaccaactcttaccaggtcttggactgtgatgtcatattattcagttttatgcttgttcctgagcagaactcataagagtgacatagtcagctgctgacggcacctcagccacgccactcttactcagttcagtgggtgtgcttgcgtggtaggatgtggtgcagccctctctacgctcttctatttttggtatatttcctatctaaccttcaaatagcttccaattctttttttcttggactggcttcattctgaatttgtgctaaaataatctttcataaagagacctcagtttatagcgtaacagactacacaatgcactgatgttttcataatgtttaagggacccactgcaagaaggttgctgcctccttttaattgtattcatttagattttgattttccatgttaagaaggtgaggtccatgttggtgcccttcagagtagagaaccatgtaaacattaggaatgaacagaggccttaggaatgaatagagagtttgccttatacaatttcctgttacaaagctctccctctcatgcaaagtagggaacaccttttgagcatctttgaatttgacaaatggtgctgttgcaaacactttttttttgagatgaa

SEQ ID NO: 593 - DNA, 319 bp; single-stranded, linear
  immediate source library: TMLR2DT01
  immediate source clone: 309389
ggcatgagtccctatacccagccattttttttcaattttttttgagccttagttgaactcacagatgcagaacccatggatacagaaggctaactgtctatctttacactgacatgggtaagttcatttattacaatttaattcaactagattcaattcaataaatgtttattgatattatctttaaggttgagccagtgtgttactctcttatcagctacacagatcatgcaaaaaaattcccccgcactaaaaattttacaattttataaatagtggtgaggggatgggagtgtgggataagaaaaagttgacaaga

SEQ ID NO: 594 - DNA, 1210 bp; single-stranded, linear
  immediate source library: LUNGNOT27
  immediate source clone: 3100562
ctcgagccgctcgagccgaattcggctcgaggccttcttcccatgaaattttgcatctgctccaaaactgctttgagttactcagaacttcaacctcccaatgcactgaaggcattccttgtcaaagataccagaatgggttacacatttaacctggcaaacattgaagaactcttaatgttttctttttaataagaatgacgccccactttggggactaaaattgtgctattgccgagaagcagtctaaaatttattttttaaaaagtgaaactgacccattatttttggtttgttttatttttattttatattttttggcttttggtcattgtcaaatgtgggaatgctctgggtttctagtatataatttaattctagtttttataatctgttagcccagttaaaatgtatgctacagataaaggaatgttatagataaatttgaaagagttaggtctgtttagctgtagattttttaaacgattgatgcactaaattgtttactattgtgatgttaaggggggtagagtttgcaaggggactgtttaaaaaaagtagcttatacagcatgtgcttgcaacttaaatataagttgggtatgtgtagtctttgctatacccactgactgtattgaaaaccaaagtattaaggaggggaaacgcccctgtttatatctgtaggggtattttacattcaaaaatgtatgtttttttttcttttcaaaattaaagtatttgggactgaattgcactaagatataacctgcaagcatataatacaaaaaaaaaattgcaaaactgtttagaacgctaataaaatttatgcagttataaaaatggcattactgcacagttttaagatgatgcagatttttttacagttgtattgtggtgcagaactggattttctgtaacttaaaaaaaaatccacagttttaaaggcaataatcagtaaatgttattttcagggactgacatcctgtctttaaaaagaaatgaaaagtaaatcttaccacaataaatataaaaaaatcttgtcagttacttttcttttacatattttgctgtgcaaaattgttttatatcttgagttactaactaaccacgcgtgttgttcctatgtgcttttctttcattttcaattctggttatatcaagaaaagaataatctacaataataaacggcatttttttttgattctgtaaaa

SEQ ID NO: 595 - DNA, 779 bp; single-stranded, linear
  immediate source library: TMLR2DT01
  immediate source clone: 310202
gcggggagtccaggttccgccccggagccgacttcctcctggtcggcggctgcagcggggtgagcggcggcagcggccggggatcctggagccatggggcgcgcgcgcgacgccatcctggatgcgctgagagaacctgaccgccgaggagctcaagaagttcaagctgaagctgctgtcggtgccgctgcgcgagggctacgggcgcatcccgcggggcgcgctgctgtccatggacgccttggacctcaccgacaagctggtcagcttctacctggagacctacggcgccgagctcaccgctaacgtgctgcgcgacatgggcctgcaggagatggccgggcagctgcaggcggccacgcaccagggctctggagccgcgccagctgggatccaggcccctcctcagtcggcagccaagccaggcctgcactttatagaccagcaccgggctgcgcttatcgcgagggtcacaaacgttgagtggctgctggatgctctgtacgggaaggtcctgacggatgagcagtaccaggcagtgcgggccgagcccaccaacccaagcaagatgcggaagctcttcagtttcacaccagcctggaactggacctgcaaggacttgctcctccaggccctaagggagtcccagtcctacctggtggaggacctggagcggagctgaggctccttcccagcaacactccggtcagcccctggcaatcccaccaaatcatcctgaatctgatctttttatacacaatatacgaaaagccagcttg

SEQ ID NO: 596 - DNA, 122 bp; single-stranded, linear
  immediate source library: TMLR2DT01
  immediate source clone: 310487
acagagncaggngcgcaaattacccactcccatattcctcggaacaccacaccctgctgctttgcctacattgcccgcccactgccccgtgncccacatcaaggagtatttctacaccagtg

SEQ ID NO: 597 - DNA, 1979 bp; single-stranded, linear
  immediate source library: LNODNOT05
  immediate source clone: 3125445
cctcctcctcgtcgtcttcctccccttcccctgctaagcctggccctcaggccttgcccaaacctgcaagccccaagaagccaccccctggcgagcggaggtgagtgctgtcttgcctgagttgaaaggtgggtgggggagtgacttgtccagagaaggggccctggggtgtgagctccccgctgggtgtctcacgtggccttgggcatctggttgtgggggaggaggcacttgctctcctctccccatgctcgttgcaccctgttctggcgaagggctgcggcatccacagcggcgctcaggccaggaccagggggtccttggtttcttcctcttccttcctcaacacatagcctgttcccagggttctagctttgtctccctgttgctactgccagggctctggtctggccaccatcatcttctcccgactctgtccacagcctcctccctgtctccccgtctccacgccattctcttccacatgtagccagagggacctttctaaaacgcacatctggctacttccctccactccacaaatccttcgggacgccctgtggcctgcaggacaaagccccacctctgcgggagtggcgtgtgaggctcttcaccaacgggccttgcccgccctgtgttctcctcctgcccgcccccacacatgccctgtgctccagccacacccagcgccttgcagtctaaggagagcccatgcctttggacatgctgttccttctgcctggaatttccttgtccgcctggtgaactcctcgttctgcaagactccgctcaaaacagcaccttcgagaagactgccctgccccttccctgccttgccccatgtccccctcccttgggtccccagagccacgcacatccagccctggcttcccacacacggggccgtgcgtgcctttcttcaccactgagctccttcaagggcagggactgtctttatctttgcatcccccgctgcaccctgtgcctgcccactgggcactcggtggatggtgtgcgggcggatgggtgagtgagcggacaaaggtgggtctgaggctggccctgtgtggtgtgaggtttggtggtcaggacctgggcgggtggtcctgagtgctggcccgtgtgcttgaaagggtgtggtgctattgggtcctactgtgttccccaggtcccgcagcccccgggaagccaatagactccctcagggactctcggtccctcagctactcgcctgtggagcgtcgccgtccctcgccccagccctcaccacgggaccagcagagcagcagcagtgagcggggttcccggagaggccagcgtggggacagccgctcccccagccacaagcgcaggagggagacacctagccctcggcccatgagacaccgctcctccaggtctccataaattgtctttgggggattccaccacacccaatgctctggagccacaaggagtgtcccttcttccccagcagagccgtgggagggtccttgtctgctctcctttgaaccttggcagcccttggatggagggctccctttcccttcccttttttttttctttgttctgtgaaatgttaatctccgtgagttcttcctggttcatgtgttctggggggtttggggtgggagggaatgcagatgggagttgggggaggggaggatacagttcaggataccccagccctggagtcagggccagggcaggcatggccccacttgtatccagaagtttcccagggattgattgtgatggtggttgggactggaggttgtataaggtgttctttggaaggaaggggcaggagttggaattagttggtcccctactgtcccccatgaggttgtgaacccctccccccaacttttcatgtttcttaaaggcattttggttttttaaaatctgtacagcaaggagcaactttttctgtcaaataaaaatgagaaatgcaaaaaaaanaaaaaagggcggccgct

SEQ ID NO: 598 - DNA, 1630 bp; single-stranded, linear
  immediate source library: EOSIHET02
  immediate source clone: 318358
gcaggagacagtgcagaccaaagcggggagcggaaggataaagagagcccacgggcagggcccactgagcccatggacacgagtgaggccactgtttgccactcagacttggagcggacaccacccctgctgccaggtcgccccgcaagggaccggggccccgagagccggcccactgagctgtccctggaggagctgagcatcagtgcccggcagcagcncaccccgctcaccccagcccagccancccccgcccccgcccccgccaccaccacagggaccagggcagggggccacccggaggagccgctctcccggctcagccgcaagaggaagctcctggaggacacagagtcaggcaagacacttctgttggatgcctaccgtgtgtggcagcagggccagaagggtgtggcctatgacctgggccgtgtggagaggatcatgtcggagacctacatgctcatcaagcaggtggatgaggaggctgcgctggagcaggctgtgaagttctgccaggtccatctttgggctgccgcccagagacaggcctcgggggacacccccaccactccaaagcaccccaaagacagccgagagaacttctttcctgtgacagtggtgcccacagcccctgaccctgtgccagctgactctgtccagcggcccagtgatgctcacaccaagcctcgncctgcactagctgccgccacaactattatcacctgccctccgtcagcatcagcttccaccctggaccagtccaaggaccctgggcctccccggccacacaggcctgaagctacccccagcatggcctctctgggcccagagggagaagagctggcgagagtggcagagggcaccagcttcccgcctcaggagccacggcacagtccgcaggtgaagatggcccccacaagttccccggcagagccacactgctggccggcagaggctgccctgggcacaggcgctgagcccacctgcagccaggaggggaaactgaggcctgagccgagaagggatggggaggctcaggaggctgcgagtgagactcagcccctgagctctcccccaacagctgccagctccaaggcccccagcagtgggagtgcccagccaccagagggtcacccaggcaagcctgagcccagccgggctaagtnccgncccctgcccaacatgccaaagctggtcatcccctccgccgccaccaagttcccccctgagatcaccgtcacgccacccaccccaaccctgctctcccccaaaggcagcatctcggaggagaaccaagcagaagctgaagtcagccatcctttctgcccagtctgctgccaacgtgaggaaggagagcctatgccagccagccctggaggtcctggagacatccagccaggagtcctcgctggagagcgagacagacgaggacgacgactacatggacatttgaggggccactgcagccccaccgccacgccccaggggaccagccaggcctggaatgccccctgggcaggaccctgggcaggaccagaggcccacatggatgccacttcccacacagcccccaggctgccagccactcntcatggatcncctgtaccagtcagctgtcanacacatg

SEQ ID NO: 599 - DNA, 1064 bp; single-stranded, linear
  immediate source library: EOSIHET02
  immediate source clone: 318438
tacagctacggggctccgggctactttgcagggatgcgatgcgtaggtgcctttctcttcctgctgaccacaagctctgtgctgggggtacctgtgccctgaagtcctggcccctgtgtcatagccccaagtacgactcactgagccatgctcattgcaggggaggctgggtctgggggtgcgtgacccaatccccttcctcctggcctggacgctgtggcttaagagtaacagcagccaccgcccagttccagtggccccacgaagcccccagtggctgggtgtccagctgggcaaacagtggcaaccctcccagctgttgtgagtggggagtcttccagggctctcagaggtcttcgtttgcctccccaggacagggtgagtcagagctcagcatttaatctcctctccaaagtagagagcaagtcgcccacagtgggcgtgtctgtaaatattgtgacagtatttttttactgtgctgttttttttgaaaggggatgggtaaaaagtagggtgttcttgttttttgcttgggagggtgggggtgggggagggtcttattttatcttatcttttctgtggatcagaaaaaacagaagccaaactcggggtcatctttgtttttaaagctgaagtgggactgtctggcactctgtgtatttatgcgttccagcatctggaacctcccatccctgccctcctcctgtgtagctgccacctccccgctgggcccagcatggctcacctgtcccgtgggctgtgtttcttgttgtttttctctttgcaaagacatagctaggaaagcgaatgataagggaaaagttctcagggaattgaagtgttgttgctatggtgacgtccttttgctgtgaataaaggtgctctttgcagcaatcctgggggtcctggtcttggctggaggtggggcctaagccccagggcagccagggtcaggagaggcacacaggtgaaggggaggnttngccttgggtgcaccgcatggagcaggtagataggaaacgttagagacaactnttttnggacggaacctggggtcantatag

SEQ ID NO: 600 - DNA, 1192 bp; single-stranded, linear
  immediate source library: EOSIHET02
  immediate source clone: 318444
aacttgcccttctcaaacatggccgccacggcgcctctggaagggaaccgctctgggccccgcctttgatctcgttggtggggctgggggatgagagctgcaccgcgcgggacaagtcgccggcggcgcccgaacggagcagaacagagagcatggagctggagaggatcgtcagtgcagccctccttgcctttgtccagacacacctcccggaggccgacctcagtggcttggatgaggtcatcttctcctatgtgcttggggtcctggaggacctgggcccctcgggcccattcagaggagaacttcgatatggaggctttcactgagatgatggaggcctatgtgcctggcttcgcccacatccccaggggcacaataggggacatgatgcagaagctctcagggcagctgagcgatgccaggaacaaagagaacctgcaaccgcagagctctggtgtccaaggtcaggtgcccatctccccagagcccctgcagcggcccgaaatgctcaaagaagagactaggtnnnnnnnnnnnnnnnnnnnnnacacccaagatgaggcaactggcgctgaggaggagcttctgccaggggtggatgtactcctggaggtgttccctacctgttcggtggagcaggcccagtgggtgctggccaaagctcggggggacttggaagaagctgtgcagatgctggtagagggaaaggaagaggggcctgcagcctgggagggccccaaccaggacctgcccagacgcctcagaggcccccaaaaggatgagctgaagtccttcatcctgcagaagtacatgatggtggatagcgcagaggatcagaagattcaccggcccatggctcccaaggaggcccccaagaagctgatccgatacatcgacaaccaggtagtgagcaccaaaggggagcgattcaaagatgtgcggaaccctgaggccgaggagatgaaggccacatacatcaacctcaagccagccagaaagtaccgcttccattgaggcactcgccggactctgcccgagccttctaggctcagatcccagagggatgcaggagccctatacccctacacaggggccccctaactcctgtcccccttctctactcctttgctccatagtgttaacctactctcggagctgcctccatgggcacagtaaaggtggcccaagg

SEQ ID NO: 601 - DNA, 1341 bp; single-stranded, linear
  immediate source library: EOSIHET02
  immediate source clone: 318774
cggggcggggcggggcgcgctgtgtcgcgggtcggagctcggtcctgctggaggccacgggtgccacacactcggtcccgacatgatggcgagcatgcgagtggtgaaggagctggaggatcttcagaagaaggcctcccccatacctgcggaacctgtccagcgatgatgccaatgtcctggtgtggcacgctctcctcctacccgaccaacctccctaccacctgaaagccttcaacctgcgcatcagcttcccgccggagtatccgttcaagcctcccatgatcaaattcacaaccaagatctaccacccccaacgtggacgagaacggacagatttgcctgcccatcatcagcagtgagaactggaagccttgcaccaagacttgccaagtcctggaggccctcaatgtgctggtgaatagaccgaatatcagggagcccctgcggatggacctcgctgacctgctgacacagaatccggagctgttcagaaagaatgccgaagagttcaccctccgattcggagtggaccggccctcctaactcatgttctgaccctctgtgcactggatcctcggcatagcggacggacacacctcatggactgaggccagagccccctgtggcccattccccattcatttttcccttcttaggttgttagtcattagtttgtgtgtgtgtgtggtggagggaagggagctatgagtgtgtgtgttgtgtatggactcactcccaggttcacctggccacaggtgcacccttcccacaacctttacattccccagagccaagggagtttaagtttgcagttacaggccagttctccagctctccatcttagagagacaggtcaccttgcaggcctgcttgcaggaaatgaatccagcagccaactcgaatccccctagggctcaggcactgagggcctggggacagtggagcatatgggtgggagacagatggagggtaccctatttacaactgagtcagccaagccactgatgggaatatacagatttaggtgctaaaccgtttattttccacggatgagtccacaatctgaagaatcaaacttccatcctgaaaatctatatgtttcaaaaccacttgccatcctgttagattgccagttcctgggaccaggcctcagactgtgaagtatatatcctccagcattcagtccagggggagccacggaaaccatgttcttgcttaagccattaaagtcagagatgaattctgggaaaaaaaagngggannngaggngngnnggaggntngngggngggnggtggtaggaggnnggaagtggnagangnagggggggggccttttt

SEQ ID NO: 602 - DNA, 2022 bp; single-stranded, linear
  immediate source library: THYMNON04
  immediate source clone: 3188122
gccggcgcgaaacgagcgtacttccttgtcgtgtggcctcagtccttcgccgtccctcgccgtccttcgccatcgcacgccaccgcaccccatctctcgaaatctgcagacatcttgatttttcccacgctgtctgtcaggtctccgccgccactcgacggccagggcgccgggccttgtgggctgtgctgcacctcggacggcttcgcaccagccagcgccctctctctcctgcagcactctgatctgcaccccctgaggggcttccactgtccgcggggtgagaatgcccctgggagtgtcacatgactgccgccccatgtgtgtgagaggcgtcctctgggagagcatggatcctgaggtcccaggattgtcagctgacctctgtcctgtgtgcccagtggccccaggtgacgtgtcttcaagaagaggctgagctgcggtgcttgtaaggtctcagccttagatccaagggacagtccaagggaagtcctaagaccatggatttgtgatctgggatttgggtttntgaatattccggaagacaattacatcaacttttattaaatttaagcanttcaccnantncntgcttacatggctcctatatcctcttcggaaanaagccaaaacccgtaaanaattcagggnaanccaaanttgttnagaattaggggtgggggncanaggaaagaanttgggnataantgcnagatcataaagaantgtaaaagagttacctatctgttctccccctcctgctaacgcaggggctggctcgagcccagcctccctgcccgcatctcagtggagctcttcccccagcattgtctttcagatgaaaagatacatctgttccccactgagatgtttttttgggggagagagtatgttttgttttttattttgattatatattgacaaattattgtatatttttatagggtacaatacggttttatgatatttgagatcatatgttaattagtgtaatcattccaccttatattcaaaaatcataaaaccgtattgtaccctataaaaatatacaataatttgtcaatatataatcaaaataaaaaacaaaacatactctctcccccaaaaaaacatctcagtggggaacagatgtatcttttcatctgaaagacaatgctgggggaagagctccactgagatgcggggcagggaggctgggctcgagccagcccctgcgttagagaagggggagaacagataggtaactcttttacatttcctttatgatctggcacttctccccagctccttccctctgccccccacccctactcgttcaacagttctggtttgccctgacttctctacggctctggcttcttcccgaagagatataggagccatgtaagcacgcaggggttgaactgcttaatttcactacatgttgatgtacttgtcttccgtcttgtaggtcttttctatataactttatgccacccttaaatgaatcattgggtatacctgtcatgttggatcctgtaatcacagttttccctgctcacctttttgtctaagatctattgagaaagggaaatatgggaaggagaaccatttgatcagaatacaaccaatagtctttaagcattgttaaagtatgaaactgaaatacattcaaaacacttaatccttgaggcttgtgatctgagtaattagcaggtatgatgctgggactggaaaatagaaagtaataactaaagggttaatgtgcaacgttattttttggccttgttcatgattttatgttttcagtgtcctgtgtacatatagaattgttaaagttgtcatttccaatatttatattagaaaaattatttagatactttataattttaaccggcatttttaataatgacacttgcatttattgtattgtaataaatttcacttttaactttaaaagtttaactttaaaatttttttgtgatgttgccttgcctganaagataacaaaaatgagagaatttcttgatgttttaaaatggg

SEQ ID NO: 603 - DNA, 3458 bp; single-stranded, linear
  immediate source library: THYMNON04
  immediate source clone: 3191066
tttaaataatctgcatgccattgagacacctgcatgtctggtgtttgtggttcaagtgtcttgccgccggccttcggatgtaaacccactgataacggacagaaagagaatgcccacaagtgggtcttctgtggaagatgcagaaggaggaagttagtgcttacattttagtctttttctccctcaaaaaaataggttaagtttcagtgccagctagaaaatactgctttctgccatcgattgggggtggtttttgtcaaatatactgttgataaatatttatttttgtaaacttgaagtgtgtggtggccgtggggggagggacatgctggcagcaggcgccttcttcagctgtgggtcctaaaggcctttgatcctttgaagaagaaagacatggtatttgttcagcagacgccgaccactcagacggaggggcccctgggattccctgtctcagatggcctggtcttacgcctgtgtagatttcttctccattgggaatgaaggtgtcaggcgggactggaacgttctagatggtatgttccgtgatattaacaactctaacccaggacagaccacaagccacactcagaggcctcactgtgctgggggcttcggtgtccaggcgcccaggtgtggccaccagcaccggtttctgccttcgcgttgctggggtgcagtgagactgccacacgcgtgcacatgtggctctgtgggtgtctcctagagaggacgtggcccctgctgccagcccttgagcagcccgtgtgggggcccgagggacccacacagtgggggccagcctcactggagggagagcaaccctttgccgatgaccacgcttgccgccatctcttagttttctttttcacaagcgctttatttttttaatagacaaatcacattttgcaaggcctttaattaaataagattcttctttccttcattttatgctttatttcctgtttgaaggcttactgtaggaagtggcttactgtagaagcagcttgctgagcccctccgagcggtccccagaattagctggttcacaacccccaccctcccccgcccccgcctgtgtcaggtgtggatgaggtcgtcacactcagaaggacaggcttgtctgccagctcacaaggggaggctgcagtgggtttgggagctgggtttaggcccctggtgtctgagggcccaggccttgccagcctctggtgctcctgctcctgggtttgaagatgcaggccgatcgccagctccgtggcagcggtcactaaggacagcctgactgtgccatcttggagcctcaggcggggctccggagatagaagacaggtcgccagaggctccccctcctctcctctcccctctgcagatgctccctgggcgctaccctgcagggtgccaggcaggagtggtctcagaacgtgcgcttctgattattttactggggtccattgtccagatttttctttgattgtaaaatatatttttactttttagtcttctaatttaataaatgatccatataaaaatagagaaataaagtcctttaagggaaggtttctgggccgagtgaaagacttggacacagagaagtatttccatttggtgctgcctacggacgagctggcgganccaagaagtctcaccggcagagccatcgcaagaaggtgctcccggaaatctacctgacccgcctgctctccaccaagggcacgttgcagaagtttctggatgacctgttcaaggccattctgagtatccgtgaagacaagcccccactggctgtcaannactttttcgacttcctggangancaggctgagaagaggggaatctccgaccccgacaccctacacatctggaagaccaacagccttcctctccggttctgggtgaacatcctgaagaacccccagtttgtctttgacatcgacaagacagaccacatcgacgcctgcctttcagtcatcgcgcaggccttcatcgacgcctgctcaatctctgacctgcagctgggcaaggattcgccaaccaacaagctcctctacgccaaggagattcctgagtaccggaagatcgtgcagcgctactacaagcagatccaggacatgacgccgctcagcgagcaagagatgaatgcccatctggccgaggagtcgaggaaataccagaatgagttcaacaccaatgtggccatggcagagatttataagtacgccaagaggtatcggccgcagatcatggccgcgctggaggccaaccccacggcccggaggacacaactgcagcacaagtttgagcaggtggtggctttgatggaggacaacatctacgagtgctacagtgaggcctgagacacatggagagttggtcaggctgctgctgggagaaatggacgcccactgggcctcaacttgatcttctaccccgtgcctgtgactcagactgggaaatactgagcagagacggctggggcgggggcaggaggaggggctgctctctgagacaggggcgcccccgccttgacccctgggcacctccatcccctcccacctgtccccagatcagtctctgggatggaggccagagagctggtcaggctcccccatctgcccagcacggcctgcactgtgcccacccacttgctccacaacgtccagttggtcctgctgccaagagccccgtgcatccaggcggccaagcacaaactgggggagaggaggccgccagcccggaggctgcagcccagaaactctacctcatccacactggtgcagggagccctccttgaactgacctttgattggtttctgcttcaactaccaaaatgttatctccacttccccctcacccatagaggatcctggccacagacagtttcaagtagtgtcagatttttgttgcttgggcggctgttggtagagtgggcagtgcccgcgccatggggtgctctgtgggcttctccaggagcagggagggtggaggggagggatggggggcacaggagctgggagccccgtctccaggtaaaaggagaggggttaagatgcaccgaggctgtagctgggctacttgatcttgctgaaagtgtttctaaagatagcaccacttttttttttaaagcttttatatattaaaaaacgtatcatgcaccaactgtgaatagctgccgcttgcgcagaggacccggggaggggtcccgagtaggctccccatgcaacactggaaatgactgttccagagagcgggcagacctgggcagagcgcccctggcgcctgagactaccacccactccgttcctgccagaaacgaccctctgtggccgatgggccatgcgggcccctcgcagccaactcagccagtgttgggactggctcagagccccatgggggctggaggggggcagctgggactctggaatcttctttataataaaagccttacggacaaacct

SEQ ID NO: 604 - DNA, 498 bp; single-stranded, linear
  immediate source library: EOSIHET02
  immediate source clone: 319684
ctcatccagggaatctgccatgagtcccagggagtcacactccccactcccttcctggcttgtatttacttttcttggccctggccagggctgggcgcaaggcacgcagtgattgggcaaaccaattgctgcccatctggcctgtgtgcccatctttttctggagaaagtcagattcacagcatgacagagatttgacaccagggagatcctccatagctggctttgaggacacggggaccacagccatgagcggcctctaagagctgagagacagccggcagggaatcggaaccctcagacccacagccgcaaggcactggattctgggcaggcaccctgaaggagctgggaagtaagttcttccccagcctccagataagagccccgccggccaatccctttcatttcaacctaaagagaccctaagcagagaacctagctgagccacttctgacctacaaagttgtggcttaataaatgtgtgctttaagctgca

SEQ ID NO: 605 - DNA, 1296 bp; single-stranded, linear
  immediate source library: EOSIHET02
  immediate source clone: 320014
gccgcctgggcttcgaggtggacgccgagggattcgtcacgcacgtggagcgcttcacattcgccgagacggcggggctgcggcccggggcgcgcctcctgcgcgtgtgcggccagacgctgcccagcctccggcccgaggccgctgcccagctcctgcgctcggcgcccaaggtctgcgtcaccgtcctgccccccgacgagagcggccggccccgcaggagtttttcggagctgtacacgctgtcgctgcaggagcctagccggcggggggccccagatcctgtgcaggatgaggtccagggggtgaccctgctgcccaccacaaagcagctgctgcacctgtgccttgcnaaaatggtggcagtcctccagggcctggggatctggccgaggagaggactgagttcctgcaacagccagaactcgctgtcaccacggcagctctctgtcggatggaggccccagtcctgcccaacaccaccccggacctcctcctggccaccacagccaagccatcagtacccagtgctgacagtgagacacccctgacccaggacaggccaggcagtcccagtggctctgaggacaagggcaacccggcgccggagctgagggcctcctttctgccacgtaccttgtctctgcggaactccatcagcaggatcatgtcggaggcgggcagtgggaccctggaggacgagtggcaggccatctcggagattgcctctacttgcaacaccattctggagtcgctgtcccgagagggacagcccattccagagagtggagaccctaagggaactccaaaatctgatgctgagccagagcctgggaacctctcagagaaggtctctcacttggagtccatgctcaggaagctgcaggaggacctgcagaaggagaaggcggacagggcggccctggaggaggaggtgcggagcctgagacacaacaaccggcggctgcaggcggagtctgagagtgcagccacacgcctcctcctggcctccaagcagctgggctcacccaccgccgacctgggcttnagccgtctggaaccacctgggcccctgagggcactgtggtcacactgggccctcctcaggaactctccctgcgcagaggcgtgtcttagcactgcccccctccctagccccttatttggtggcggaagtggcctccaccccttccctgtttgtaaatattctgtggagaaaagaggacttcagggagtaaaaaagccactgatgaaaannanaannnnnnnacngcgnaggantnttcnnagnnttga

SEQ ID NO: 606 - DNA, 938 bp; single-stranded, linear
  immediate source library: EOSIHET02
  immediate source clone: 320811
gggactgcgagcagaagcaacatcgctcgccatctgcaaaccaatctcattctattttgtgtcggtgctgtgggcgcctgtactctctctgtcacacaaccgtggtacctagaagtggactacactcatgaggccgtcaccataaagtgtaccttctccgcaaccgggatgcccttctgagcaaccaacatgcctgtggtttcgctacggtgctcaccagcctgagaacctgtgcttggacgggtgcaaaagtgaggcagacaagttcacagtgagggaggccctcaaagaaaaccaagtttccctcactgtaaacagagtgacttcaaatgacagtgcaatttacatctgtggaatagcattccccagtntgccggaagcgagagctaaacagacaggaggaggggccccactggtggtaagagnaattaagctgctcagcaaggaactgcggagcttcctgacagctcttgtatcactgctctctgtctatgtgaccggtgtgtgcgtggccttcatactcctctccaaatcaaaatccaaccctctaagaaacaaagaaataaaagaagactcacaaaagaagaagagtgctcggcgtatttttcaggaaattgctcaagaactataccataagagacatgtggaaacaaatcagcaatctgagaaagataacaacacttatgaaaacagaagagtactttccaactatgaaaggccataganacgttttanttttcaatgaagtcactgaaaatccaactccaggggctatggcagtgttaatggacatatatcatcaggtcttaaaaaaaaataaaggtaaactgaaaagacaactggntacaaaggagggttccagaatgtaaggggacttttacttatagtcattncccaaatncttaaaatttcnaaaaaatttagcggggnttngtggc

SEQ ID NO: 607 - DNA, 274 bp; single-stranded, linear
  immediate source library: EOSIHET02
  immediate source clone: 321651
ctcactgctagtagtcagcacaataaaggatctaattgaggtagctcagtttctgaagctctgctcttaaccatgggccccattgttttgaaaaatacggggtcctgactgaggtagggtgggagcagggaggcctgagtctactgcttgatctctaactggctgcaccatgggaatctgttacaggaggggaggccacacctggccctgcctctctcacccactctcaatcccctggcaggtgccatacacagaggctgcctctttgtctacg

SEQ ID NO: 608 - DNA, 279 bp; single-stranded, linear
  immediate source library: EOSIHET02
  immediate source clone: 334959
gggattacagccatgagccaccatgcccggccaaacttcagccttgaatattagtgattttgccatattagtttaccatctgtacaattatttgctttatgtttttctttaaattggctcattattcacttaatgaaattattgcaacaggaatcttttgtatcacttctgtaaatggaaaaccagtctcatttgccatcaataggaaggtaaaacatgaaaataaatacaatgtaaacaaaaannancnnnnnnnnaaaannnangnnanaaaaaaaa

SEQ ID NO: 609 - DNA, 613 bp; single-stranded, linear
  immediate source library: EOSIHET02
  immediate source clone: 335100
ggcctgctgtgtaagctgacagtatttgtagctgatagggggttgggaggaaagtgtctactaggagggtggggtgagattctgtgttgatgtaggaggccgagaaggcccttaactcaaagtagcttatttatccaaaatgttctggatgcatcatctccaaccaaggaccccttatttatcatgcctttgttctcttttccctcagatgtatatttctttaaaaataattttcctaataacaaaacttatttctaaaacagcttaaaaattcaaagaaaaaccccaaacactgacattacctacacttccactacccaaagacaaaatgtgcccactgtgtgcttttgagtgtattttcttttagtttgttttttgttgggtgcatatttatgataataacaatgatggacttcaattgtactcactgttctattgttggttttaattagcagcaagttgtgatcactttcccaggtgaataaatcatttcaaagcaaanaaannaaaaanaanaancnnnnnnnnnnnnnnnnnnnnnnnnnntagtcggngcgncgttngaggtccagttacgacggtgatngacgtatnnttttatnggtactaatta

SEQ ID NO: 610 - DNA, 513 bp; single-stranded, linear
  immediate source library: EOSIHET02
  immediate source clone: 336724
aaaaaaagaagcaccttcaggctggagaagcagcgtagtaacacaagtccagtccttgtgatgtggctggtagttggggatggccaggctgaagcagagagtcctagagaaatctcgatacaagcttcaaagcaacacctagacactgctctagcggttgatcctggagataaaccaacaagagagagatggaagagaaatactaaatgaggtcaaagaagactcagaaaggttctgagcctggagatgagcagggaggcctcagggcttagacctttaatgataggggtttccctgcattggtttgacctgttgcctttttgatgtgctctgtttgttttcatgtgttgtcttgtctcccctgctaaactgggagctgccaggggtctgggtcttatctccttcctccatggtaccccacacaggccaggatgtggtttggtacccagcaatcagagattggcactccctcatacaggggaaagcaacctggtctagcaaattgaaataaag

SEQ ID NO: 611 - DNA, 391 bp; single-stranded, linear
  immediate source library: NEUTFMT01
  immediate source clone: 338196
ggcggaaggaaaggaagaagggagagaagaagagaagaaagaagcagagaaaggaagagaaaagaaattacaggtgtgatccattgcacctggcccatgccaacaatatttgaaacccttatctgcgtgtacaagtttgctactggttttgttttgctcattaatacatcccaagcatctatacctggcttgtagtaccagcnnnnnnnnnnnnnnnnnnnnnnnnnnnnnnnnnnnnnnnnnnnntttgacattagtttaacatctcaagtaaaacaaaattccattcaattaattctcttcttctacttttttcttttaagagagacaaatagtcacacatacatcagcaggagaggatacaatttcctgtgtttaagtttttatgagt

SEQ ID NO: 612 - DNA, 408 bp; single-stranded, linear
  immediate source library: NEUTFMT01
  immediate source clone: 338339
tacaaattgataagagtgaaagtcataatcctacaggaggattaccctatttatttcacaaaccctatttctaccggattttcatacaaggaatacaggcatgtgtttcacctcattaatttattttttcacttagttttgatgatattcacatatattatcaagtgtgcaaacattaaattcttgtgtacaaaactcaaatggtcttccaaataattccccattcttttttcttataaactttcacagctttacccttgacagactttactcaaggaaatctaagttggtcatatgtggctctttcactgattgctatttacttcattgtccagtagcttatgtatgaaaatataattataaaatgtaagggtcctacttccagtgaaactgaagggacttaggccc

SEQ ID NO: 613 - DNA, 585 bp; single-stranded, linear
  immediate source library: NEUTFMT01
  immediate source clone: 338345
atagagttgctttgtcatctatcagtggagaaagaaagttttctctctgtctgtgatctctctctctccagtggaaagaaggtgcaggcagagttgctggtgttatcaagggtgtgggagtggaggttactttcctttctgagttaacacttgatgttttggagcagtggcattgtaaagtgtcctaggaaaaagtccagtctagaaaggacagattaggggaatgaaaagcagcagttggttgaattttaaaagatgaggttcttagggggcttagggtaataaaactcagaatgcaatagccaagtgattaaagaactaaattgggcccacatcagtagagggttggtacctaagcagccataggaaaagggcagttctttataatacatgaaaagcctagggtttaataaccacttagtaaggtatgttatgggatatcttattttagagtaagaatataaggcatagccatatttatgaaggtagtaatactctactaatcaatacttagaagtttttgttatgactaatctgaatgctttttagtttttccttaatctagttatgttggtaatttataag

SEQ ID NO: 614 - DNA, 578 bp; single-stranded, linear
  immediate source library: NEUTFMT01
  immediate source clone: 338368
cccagcacggacacacacgccagagtccaggccatattcgggtggcttgcaagcttcttccccccaagtatttactctcaaaataatggtttttgttttgttttggtttggtttggtttgtttttttccaaatacatttcttccctatatctttaaccaattctcataaaattttgtctaatacactggtcagtgtattccagaccctaaaagataacataatgaaactatctatgactaaaaggtaatcaggatcttctacttatccttttttcctccctcttaaactttaattttgatacatttgggagtgaaatgatgacaataaatgcaaagtaattattgaagaaacagtaattttgtattagcttactgaaaaaaaaaaaaangntaaccaaatatattttggcagccccaaacgagtcacatgtgaaatgcagtgggagagcagtgtcctnanggaaaaggtggcctgctggacagccaagnggcaancatccactgnagtagtatggctctaagtttggctaggcctatgtctgctctgaggcttngggcattcacttaatcagaggccg

SEQ ID NO: 615 - DNA, 365 bp; single-stranded, linear
  immediate source library: NEUTFMT01
  immediate source clone: 338435
gggctctgatcctgtgccaccctgaaaggctttgatcctatggtttggtcagaaacagagcctgtaaaacccatgtatgcagctgttgctaagggcaaccacaagatgctcaaaggaccttaaagatgtagatgcagttagttacctgaagaagtgaaagtagaagtgaagtcttttctaaaagaaaaaccacagacacaatggcaatctggggagaaagagagcctgggattgggagaagatatccaggcatttagctctctcttccccccatatttagtgtgacatatttattgtgactttataaattctttttttaattttaattttttattttaatgtttgtgggtatgcagtaggtgatt

SEQ ID NO: 616 - DNA, 83 bp; single-stranded, linear
  immediate source library: NEUTFMT01
  immediate source clone: 339045
catcccaaacagacgctctgtattcataaaaaaataacttcctacctgtctctccccctagtctttggtaacctttgttatac

SEQ ID NO: 617 - DNA, 1116 bp; single-stranded, linear
  immediate source library: NEUTFMT01
  immediate source clone: 339198
ctctggagtagaaaccaaatgtgaatagccacatcttacctgtaaagtcttacttgtgattgtgccaaacaaaaaatgtgccagaaagaaatgctcttgcttcctcaactttccaagtaacatttttatctttgatttgtaaatgannnnnnnnnnnnnnnnnnnnnnnnnnnttttacttttggatagaaatatgaagtgtaaggcattatggaactggttcttatttccctgtttgtgttttggtttgatttggcttttttcttaaatgtcaaaaacgtacccattttcacaaaaatgaggaaaataagaatttgatattttgttannnnnnnnnnnnnnnnnnnnnnnnnnnnnnnnagccccatttgtgccctgccgcacaaatacacctacagcttttggtcccttgcctcttccacctcaaagaatttcaaggctcttaccttactttatttttgtccatttctcttccctcctcttgcattttaaagtggagggtttgtctctttgagtttgatggcagaatcactgatgggaatccagctttttgctggcatttaaatagtgaaaagagtgtatatgtgaacttgacactccaaactcctgtcatggcacggaagctaggagtgctgctggacccttcctaaacctgtcactcaagaggacttcagctctgctgttgggctggtgtgtggacagaaggaatggaaagccaaattaatttagtccagatttctaggtttgggtttttctaaaaataaaagattacatttacttcttttactttttataaagttttttttccttagtctcctacttagagatattctagaaaatgtcacttgaagaggaagtatttattttaatctggcacaacactaattaccatttttaaagcggtattaagttgtaatttaaaccttgtttgtaactgaaaggtcgattgtaatggattgccgtttgtacctgtatcagtattgctgtgtaaaaattctgtatcagaataataacagtactgtatatcatttgatttattttaatattatatccttatttttgtcagaagaaaaanggnnagannaaaaaanctngnggnngggcccgggacccatt

SEQ ID NO: 618 - DNA, 281 bp; single-stranded, linear
  immediate source library: NEUTFMT01
  immediate source clone: 339335
caatcttgggcatatatatacatttatacttgaacaatatgagctgctgggtgtacagagttctgagtgagcaatgggaaaaatcaaagtcattatcctgggagatgtccatgggagaagcaaatttggacgagagtagtaattttagttatccttactcctttctcccaaaatgtagatacacgagaattgactctagttctttctttttggtttgtccctttctcttaactcatctaacacctnacatattcttttaaacagtgttagggagtttgttt

SEQ ID NO: 619 - DNA, 427 bp; single-stranded, linear
  immediate source library: NEUTFMT01
  immediate source clone: 339678
atgtatatatataatctttgaaattaggtgtgtcttttatatataatctcctataatgtcttttatatgtatatataaaactctacatctaatttcagagatactaagatgtggggaaatgtacttagaatcaatgaaatacggtgttggtgaatgcaaaacttgtcagtcatatttattgatttcttctgtgtacagataatgggcatttggtatttattcatttatattttttttttggtcttaatgggacatggtgtctgcttatttgaattatttccggtctgatttctatattcccatgtaggattttcanttacttaatatttatatctgtgcccattgaaggggaccttcaggaaagcatccnctggggaaggccctccaaacaaggaaaccgtntaggaatattttgcagtttgnctta

SEQ ID NO: 620 - DNA, 704 bp; single-stranded, linear
  immediate source library: NEUTFMT01
  immediate source clone: 339997
agacaatcagcaaccatacctgaattgcatgtgtgcaccaatacaacaaactaatgaagttaccaaaatataattcaacaactgtgattttcaaaatgagccaactagtgtcccaggcagtcgtgatgcaccctatgccaaaatcaacgtgtttccttttactaacgccatttgaaatttaacggctgagaatcacaggccttctttgatacaagctgacttccatagttttttccaagtccaacaatgctacgccggatatctgtgcttccacagatatcaaggaattcttccaaggttcagaagggaaatggtctaccccaggtcatccagttagcttaaaaggaggaataagcccagattctctgcccttcaagtatctgccccctaccccagactctcccatgtacagctatttaaaaatctgatgagtaaatcacccatatattaaggcaagagctttcaggctctgcagtctactcttctgagccactcctaaagagtctacatgcaggcaattgtatcccacactctggcctcacccatgctctgtggacttcatggaagattcaaacaatcgatggaatcagggcttgtgaaaggtgagcgttttgaaattcctcctgccttgtcttgttcctgcagcaggttgaggccagtcttctgctctctctacaaccacagggcaccagacacaaggactt

SEQ ID NO: 621 - DNA, 370 bp; single-stranded, linear
  immediate source library: NEUTFMT01
  immediate source clone: 340100
agaatatctattgttttctcttttgtaggatctgtatgattttatctacttaacagatagcactaattagattaaaattctataagaaactttttaatttgctgttcataatttctgattggtatgcaataactgtttcaatgaaaatcaatgtaatttagtattttaatatttgcacctttgtgaaatatagtaaataaattaagcactatcaccaccttcacagctacttaggagatccacaatcctgggttgggagccagtggatttcctgaaacacagatttgttaatgcgtttataaaatactgatgaaatgatattagtaatgtgcagtgaccatcattgactttcatgatacaattaagttta

SEQ ID NO: 622 - DNA, 484 bp; single-stranded, linear
  immediate source library: NEUTFMT01
  immediate source clone: 340318
gaaacttcaggcgctacaatctctgaaataacanaagtgtagaatttnggttccacagacaacctggctttttcccggagcgcacttgccaatctgctgctgtggaagggaaatagagcccagacggaaagagagtcgctagactgaggaagacggaggttggagtttggggctgccagaatgtctggaagatgagagttaaaatcctggaatggatgggaccacagaaaagggagttcccaacctgcaaacaaatctccctcaagtcattggcaagctctacatgcacagggtgagagtccaagaaacttggaagagaaaaatagcaactgggaagctacaaaagcgaacaaggcttccagcagacatgtgatgctggggacacaggttgccaagctgaagaggccttggtaagcatctcaggctttccccctaagaccaccccaggggtaagggccaaagtgnaatagaccagccctnaaca

SEQ ID NO: 623 - DNA, 604 bp; single-stranded, linear
  immediate source library: NEUTFMT01
  immediate source clone: 340422
gatttcgggcatcaggtgggcgacccgcgtaggcgtctgaaaggcccgcgtcgttagggagggcaggagtggcgtctctggttacggggtcgggcaaagggcagaggtcaccgtccaggttggacagcagcacctttgagcgatggcggcgtctggggaaccccagaggcagtggcaagaggaggtggcggcggtggtagtggtgggctcctgcatgaccgacctggtcaggttagtccggggccagttactcagtctgcggctcgggggaggaggcgtgccgtgcgctatgcgcccagtggagcttttgggcgctgggtctccagggatagacagtgctagctttgggtatgagctgcaggttttcgaagccttcagcctaccttcctggcatgaaagaacttgagtatataaaggtaaatctcaggggaggggacgtaataggccagggtttagtgaaagctctaatattactcaaagcgctccccaaagacctgccctccaaagacttgcgcccccaaagacctttcttggcccggctgctgagcctttccccaaacgagccagggaactttgcccacgtcattttacctccgagaatgtg

SEQ ID NO: 624 - DNA, 505 bp; single-stranded, linear
  immediate source library: NEUTFMT01
  immediate source clone: 340450
gctttgagagccttgggttggtttccagccccaccctgcctggtcctgggagcagcccctgttctgtccagcagccagtgaggccctgtgcaactctgagcacataatgaaccctctgatggtggcagctgtaatgacgacatcgtaggcctttcctggcctgtcttcccagttgcctaatggggttgtcttggtaccttctgcctgaaaattcatgaacctgggttggtcaatggctttgaactaaaggtatcaattctgtaggtggtagcttgtggccccacccctcagagtgacctaagaaacgcacataggagatggaggctccatgctgtgtcagctgtgtcacaggatgcccgccttcacggctctgaagggacctgtaggatcagaagtctgaggctagtaatgaggaggagagccggccccacacaaaacatgaccacaggaaaaaacctatctgtgtaaccactgagccaggtagggtgtgactggccacttaaca

SEQ ID NO: 625 - DNA, 1464 bp; single-stranded, linear
  immediate source library: NEUTFMT01
  immediate source clone: 340883
accaaaacccttttcttcagtatcgacaaagattacattctgagtaccaaccaaaccctaaattgaaagacaaaactatggtttcagtcaacatattcatgaattagggagctaatgggttaagcttccagttcccgctatgctactggatttgtataaatactgatattctccaaacctagtggtgtagggagcaagagaatgcagctggaaggcacaaggggaggacattgtggcattcagaaactgcaggagacaagatgaatttgagaagccaaatggaatttttaatggaaaccatttatcagattaatctcttgctctcctgcattttagaggacaccaattaatttcctggtctttagtatataataacctaaaataccattgtaacctcagtcatgaaaaatacatcactctgtctttttagctcaaatgtattttcctaattgcccacttgagaacaagacatttgacaagttatatcaacgactgtgcttgtccattattttacacatgccctagaagccaaaactgaaagccactggatcctggtctagctgaatcttcagagtgggaggtctccaaaaagatattaccttattgggcttaacaattcacaaggcactttcacacccattatctaatttaatcctcataatgactatgtgaggcaaatgccacattgcccatttttcagataaaggaaacaaaatcttagggaaggtaagttgagttgtccaagagcacactgaaagttgaatgttatctaatgcattcctctacctttcagaagatcagtagctggctgagaatctttgccaaatcttccttgctagccagaagtggaattggcagcttctagaatatgtacacctctggacaaaatgttcctcaatcttaagatacaaagaccctcattgtctgggtctattcccacacttactgagtacagatgaaggaaagtggtagcaatttaatcataactttcatttgctgaaaaacattatgagaaggcctcccttcctaagccacctctggtcttgctaagtcttgatcttgcttcctgccagcaccaaacattacattcaggggatttcctctggggttagtctttttcccttgaagttctctaatagatgttacttttgacaaaagcatcgcctatgagttacaagcaccaggggatgctctacatcaagggatgcaccttaagtcaaactgtcaaaaagcccagaattcccaaaggcattaggtttcccaactgctttgtgctgatatcagaacagcagaaattaaatgtgaaatgtttctgatgacttatgttctacaatctatggacatacggggatttttttttcttgctttgaagctacctgggtatttcctatttgaaataaaattgttcggtcattaaaaaaaaaaannanagnnaaanaaaaaaaaaactcgngggggggnccc

SEQ ID NO: 626 - DNA, 245 bp; single-stranded, linear
  immediate source library: NEUTFMT01
  immediate source clone: 341595
acgagctgaagagtatcacttatatgcagtgcatatacatgtaagtgcattacttagctcaaatatcttatgacctattacagtcaactcatgcatgagtgtgaacatgtattacagaaggtcttacagccttagtttctgttttagattttatgtgctgcttcctttctcaaacaaaagcatgaaaggaaagaggataagtactagaaatattcatttttttccttcacaaatctaaatgttgc

SEQ ID NO: 627 - DNA, 2291 bp; single-stranded, linear
  immediate source library: NEUTFMT01
  immediate source clone: 342342
gccgccctcccgcccccaccagccggccggaatcactcgccactgcccccaccccagaccaaccacgaagaacccagcagaagcagaaaccacaaaacggcaaagcnccctgctccttcaatagacagaagcacgaaacctcccctagatcgttcattagctccgtttgatagagaacccttcacactaggaaagaaaccaccattttctgacaagccctcgattccagcgggaaggtcactcggggagcatttacccaagattcaaaagcctcctttaccaccgaccacggaaagacatgaaaggagcagccccctgccagggaagaagccacctgtgccaaagcatggatggggaccagacagaagagagaatgatgaagatgatgtgcatcagagacctttgccccagccagcactacttcctatgagctccaacactttcccttcaagatctactaagccaagtcccatgaaccctctcccatcctctcacatgcctggagcattctcagaaagtaacagcagttttccacagagtgcctccctgccaccatacttctctcaaggccctagcaacagaccacctatcagagccgaaggagnaaacttccccttgccacttccaaacaaacctcggcccccatcccccgcggaggaagagaattcattaaatgaaggagtggtacgtttcttatattaccccgaccagaggcagaagctgctcttagaaagataaaccaggatggcacatttctggtcagagacagctctaaaaaaacaacaaccaatccatatgtcctcatggtgttgtacaaagataaagtttacaacatccagatccgttatcagaaggaaagtcaagtttacttgttgggaactggactccgagggaaagaggactttctgtctgtgtcagatattattgactacttcaggaaaatgccacttctgctcattgatgggaaaaaccgaggttccagataccagtgcacattaacgcatgctgcagggtacccatagcaagttatagccgagcaaatgaaccgtcctcctgcctctgttgccaacacgagatcaatcagccttggtcaatggacaaacacttaggactgaactgaacccctccccatgaacacaagggttttatcctttcctttaaaaacagtgtttgaaatgaagactgtcaactatcccataatttatttattcttcttcaatgtttgtaaaagtgcatgagtcatgttcacacttgaagtctagtagtgcactgtaataattcatttttttaaaagattatttaatgcccatttcaaaatacagtagtttacacagctacagaaacaatttggggcaagttttaaaacactgaaacagtaatagttattggtgtcacataaaactgatttgttttttacagccaaacctctgtcagtcagaggcattcattagttttatacatgtaatttgaaaatcactaaacctcgttttctcagcagcaataatttaagaggcttcaaaaatataatttcactcttatttagtattttttcctggggggatttttacgtaatttttttatgaaaagacaaatgcatgttgagataacttctgggattaaaatagtcttttgctttacttttttggtttcctaaaacaactttattgacttttagtccatactgttatnnnnnnnnnnnnnnnnnnnnttaaactacaaataccaaaagaaaacattttaaatttagggatgagactttggtgtatcgtgggtctaggtttaatgaacacatctggggttaagttggcatttcttcacatctccacacccacaccaaccatcacagccccccaccaaccttctcccaaccccaaaagcattgtccagggatatagattttaccaaaggcttcctgggaagacgagggagcaacactttagattaaatgtgatcagactttcctattagatatggctcttctgtctcttgttatccccctgacagctctgccataaagtcccttctcctcatccttcccaaacaggctgtataagtgctttgaggtaattaaactctttcctccagtttacaaatatcacttaacaaaaaatataggcattcagccagattaaaaaactggtattcagccaaatagtgacaatcagttgttcttcaagtttttccctttgggaccttggttgttattgcacaacttttattagcaacaatttttggcgtctctgcttaatctacaagttttcgaaatggnaaagagtatcttgcagcttcat

SEQ ID NO: 628 - DNA, 1427 bp; single-stranded, linear
  immediate source library: THYMNOT02
  immediate source clone: 343466
attcattctgttgtaaatgttcaatatatttattttgagagcaaggacctgtggttgtaaacaggtgtggttacaggtgtggttatgtatctgagtgttgcggtcatactctcctccagtccaatcctgagcatcttcatcttattaattagctgttcgtttcacgtgtgcactcattcttttatttttacttctttttaatgttatggtatccagttgtttccagtagcagtttcttgaacttctggcctgtactactaactgcagacctccagagtcactggcctttctgtgctctacatattattttaggggccacatcagttgccaagagcaacatacataccgacctggctgaattattgccagtgaaaacaacctgtacgaagcctttgctcaggttctaaaatatgtttgtccttgcacgaattttgtatatttcaaatatttctgtaaaggtttcttcttttctgttagagtgtggtgttaagccagagtcagtggtttgtgttctcattaaaatgtttgtttaaatcctatgtccaattcaagcctatctaactacatttggtaggattaacatttcatataacaaatggggcttaattaaaaactttaacttggaataaaggaacagggatcactttatcttctgccttcatttaccttagtccaagattcttgcaaaacaggcaactgaacaaacattaggtttatgtaggtaaaatgtgaaagcatttctcctccactttttaaaatttaatttacccagtacagcggggcaccagattacttgatctttgtattttgcagttttgagcctttgtgtcaatcccaagcacagagaggatctgccaaggaaaaacatttgcatcttcggagtagacattttgcagtttgtttaataacaacttctaaagtaagttgaattcatccattgtcactgattcaccaagtggatgttgcattgtggaatttgcctgagtactgttgtcattctgctcagccaggcacggtcagtttcttggccagggacattgctatgtgctgtgtgcaagctctttagaagagagattggattttcttggcattatcagcactcatgctatttagtctacttctattttgactgactctttaaattagtacaatttttctacttgtcatataactcctggaacaatagtacgggaagccgtgatccttttccctgactcatgattttagtctttttccaaatcgcnnnnnnnnnnnnnnnnnnnnnnnnnnnnngctgctccaacgaccagcatgtgttggagcagatctccatggtaagccaaaagtggacttgtcagcctataactactcagcagctgccactaactctacaggcacagtaactacactttatacaggagcacatgccaaagtgcctgggaggtgcc

SEQ ID NO: 629 - DNA, 1646 bp; single-stranded, linear
  immediate source library: THYMNOT02
  immediate source clone: 343595
gtccaagattgatctccttgatcggaaggaggatgtgaagaaaaaactgaagaaggccttctgtgagccaggaaatgtggagaacaatggggttctgtccttcatcaagcatgtcctttttccccttaagtccgagtttgtgatcctacgagaatgagcaaatggggtgggaaacaaaacctacacagcttacgtggacctggaaaaggactttgctgctgaggttgtacatcctggagacctgaagaattctgttgaagtcgcactgaacaagttgctggatccaatccgggaaaagtttaatacccctgccctgaaaaaactggccagcgctgcctacccagatccctcaaagcagaagccaatgggccaaaggcccctnccaaggaattcagaaccagaggaggtcatcccatcccggctggatatccgtgtggggaaaatcatcactgtggagaagcacccagatgcagacagcctgtatgtagagaagattgacgtgggggaagctgaaccacggactgtggtgagcggcctggtacagttcgtgcccaaggaggaactgcaggacaggctggtagtggtgctgtgcaacctgaaaccccagaagatgagaggagtcgagtcccaaggcatgcttctgtgtgcttctatagaagggataaaccgccaggttgaacctctggaccctccggcaggctctgctcctggtgagcacgtgtttgtgaagggctatgaaaagggccaaccagatgaggagctcaagcccaagaagaaagtcttcgagaagttgcaggctgacttcaaaatttctgaggagtgcatcgcacagtggaagcaaaccaactttcatgaccaacttgggctccatttcctgtaaatcgctgaaaggggggaacattagctagccagcccagcatcttccccccttcttccaccactgagtcatctgctgtctcttcagtctgctccatccatcacccatttacccatctctcaggacacggaagcagcgggtttggactctttattcggtgcagaactcggcaaggggcagcttaccctccccagaacccagggatcatcctgtctggctgcagtgagagaccaacccctaacaagggctgggccacagcagggagtccagccctaccttcttcccttggcagctggagaaatctggtttcaatataactcatttaaaaatttatgccacagtccttataattggaaaaatactggtgcccaggttttcttggagttatccaagcagctgcgcccctagctgggatctggtacctggactaggctaattacagcttctccccaacaggaaactgtgggatttgaaaaggaaagggaagggaaaacagagaacctagtggtctaccaagtggttggcaactttcccaatgtctgcttactctgaggcttggcactgggggccagggcctgccccagggctcctggaatttcccttgatccagctaggctgggacactccctaaatcagctgcgtgttgttagcatcaggcagaatgaatggcagagagtgattctgtcttcatagagggtggggtacttctccataaggcatctcagtcaaatccccatcactgtcataaattcaaataaaatgtctgaac

SEQ ID NO: 630 - DNA, 1898 bp; single-stranded, linear
  immediate source library: THYMNOT02
  immediate source clone: 343619
gataaacaacttcaacatgacccagctcctgctcacacttccataatgagctatctaaataagttagaaacaaattacagttttacacattcagagccactttctacaattaaaaatgaggaaaccatagagccagacaaaacctatgaaaatgttctgtcctccagaggccctcaaaatagtaacactaggggcatggaggaagcatctgcacctggaattatttctgccctttcaaaacaggattctgatgaagggagtgaaactatggctttaatagaagatgagcataatttggataatacaatttacattccttttgctagaagcactcctgaaaagaaatcaccactttctaagagactatcccctcagccacaaataagagcagctacaacacagctagtcagcaacagcggacttgctgtctctggaaaagaaaataaactgtgtacacctgtaatctgttcctcttcaacaaaggaagcagaagatgcacctgaaaaactttccagagcatctgatatgaaggacacacagctcctcaagaaaataaaggaagcaattggtaagatccctgctgccaccaaggagccagaggaacaaactgcatgtcatggcccatcaggttgtcttagcaacagccttcaagtgaaaggcaatactgtctgtgatggtagtgttttcacttctgacttgatgtctgactggagcatctcttcgntttcaacgttcacttctcgtgatgaacaagacttcagaaatggccttgcggcattagatgccaacatagctagactccagaagtctttaaggactggtcttctggagacatgaattcagaagaaaattcatcaggtgcttctttttaaaactagaacttggctatattgaatgtgtatttttctttagtgaaatgatgttttatgttattatgtgtgaagtaatatattgtacaagtaataaatgtattgttgagatatattgacactgaggagcttataaaaacaagtcatcttaagttcacaattgctacaagaagaaagttgtggataactaggaaattattgtaagtaatgttttatttcagtacttagcaattagagttcttttattaagatgtatctgctggattaagggtacaggttgaaatagttctgtggctgtcctaagaaataatgggaaaagaatctctggatgtaagtttttctgttgaaactagagggttttttttttctgtttacatatacttttttttaatagcaatgtgtttttattaaacatgctgtgtgccacaggccagtgttgttggtgaaatatataaacatttatttaaagagaaaagttaccagtatctacacctcttaaaaaaacattgattggtctaaaaaatatatagataacatcctaagttaacatatggcttcttaaaacttgggcacttttatttgtttttatcccaaattcatgttttaaggcctttaaagaatagtcagactgataaagaagtgctaacagataagctatagttggggaaatttgtgggttttttttaaataagaaatgtttatttttgtccttatatttaaacatgatggaatttgtaaatcttggcattgattgtaattctgcctttttggaagaattttttctcccagcatgttagctgagaatattctctattttataaataatatgaagtaggttggtctctctgcttctctataccaggacttcttagctcagtatcatctcccttcatgtaagcagcacgttttaactcttaggaagctgaatgttgtgttatcactaatactttgtacaggtcacctgcctactctaattgtccttagtacttggacaggctttatcattaaagagtgttctcctaatcccag

SEQ ID NO: 631 - DNA, 262 bp; single-stranded, linear
  immediate source library: THYMNOT02
  immediate source clone: 344012
ttttttaaaaaaggaggaaaacccacccaaacaaaaaaaaacaggctcagnttttgttctctttgggnttctttgtattatttctatttgaagtaaatgccaggatttaacgagattctattaaaaaagaaaggcctggttcattctaattctcaaggtttaattctttgctctcatattttaataaatatatataatttgtgacgtatttaaaggaaaggtgttttcctcctatagagataaacttacctagattgcttgg

SEQ ID NO: 632 - DNA, 348 bp; single-stranded, linear
  immediate source library: THYMNOT02
  immediate source clone: 345315
cagagcgtcaccttctctttggctaattataatcattttacttaatatttcatagttaaagggtagagccgcgatcaaaactggctccgaggtccaggcccttttcccaacactatgctgtctcacagagtgtaggttgtttgaaccctcaagattattaactgactttacccctattttccattgttcagtttcctccttttgtgtcataccctattcccaggggatgaaaggattaatcaatacttgggaaaaaaacaacaacctttgaactgtttcaggccatattgtaaagaagtgtgtcttgtgattttgatacccagaaatctccagtggagggtattctct

SEQ ID NO: 633 - DNA, 2637 bp; single-stranded, linear
  immediate source library: THYMNOT02
  immediate source clone: 345380
gtttgnnnnnnnnnnntntntacnacagtatgcagtgcatagacttttagccccagcagtccttaaaccaacaatacttgaaccaacctcctctgtcagtagatctatgaataagtctttggagcaacaggtttcgaccaacacagaggtgtcttccgaaatctaccagtgggtacgcgatgaactgaaacgagcaggaatctcccaggcggtatttgcacgtgtggcttttaacagaactcagggcttgctttcagaaatcctccgaaaggaagaggaccccaagactgcatcccagtctttgctggtaaaccttcgggctatgcagaatttcttgcagttaccggaagctgaaagagaccgaatataccaggacgaaagggaaaggagcttgaatgctgcctcggccatgggtcctgccccactcatcagcacaccacccagccgtcctccccaggtgaaaacagctactattgccactgaaaggnatgggaaaccagagancaataccatgaacattaatgcttccatttatgatgagattcagcaggaaatgaagcgngctaaagnntctcangcactgtttgcaaaggttgcagcaaccaaaagccaggggtggttgtccgagctgttacgntggaaagaagatccttntccagaaaacagaaccctntgggagaacctntccatgatccgnagttcctcagttttcctcagccagaacgtgatgccatccgtgatgccatttatgaacaggagagcaacgcggtgcatcaccatggcgacaggccgccccacattatccatgttccagcagagcagattcnnnnnnnnnnnnnnnnnnnnnnnnnnnnnnnnnnnnnnnnnnnnncaccgccgcctncacagccacagcagcagccacagacaggccctcggctccccccacggcaacccacggtggcctctccagcagagtcagatgaggaaaaccgacagaagacccggccacgaacaaaaatttcagtggaagccttgggaattctccagagtttcatacaagacgtgggcctgtaccctgacggaagaggccatccagactctgtctgcccagctcgaccttcccaagtacaccatcatcaagttctttcagaaccagcggtactattcttcaagcaccacggcaaactgaaggacaattccggtttagaggtcgatgtggcagaatataaagaagaggagctgctgaaggatttggaagagagtgtccaagataaaaatactaacacccttttttcagtgaaactagaagaagagctgtcagtggaaggaaacacagacattaatactgatttgaaagactgagataaaagtatttgttttcggtcaacagtgccactggtatttactaacaaaatgaaaagtccaccttgtcttctctcagaaaacctttgttgttcattgtttggccaatgaatcttcaaaaacttgcacaaacagaaaagttggaaaaggataatacagactgcactaaatgttttcctctgttttacaaactgcttggcagccccaggtgaagcatcaaggattgtttggtattaaaatttgtgttcacgggatgcaccaaagtgtgtaccccgtaagcatgaaaccagtgttttttgttttttttttagttcttattccggagcctcaaacaagcattataccttctgtgattatgatttcctctcctataattatttctgtagcactccacactgatctttggaaacttgccccnnnnnnnnnnnnnnnnnnnnnnnnnnnnngtttgttactctattgtatgttacaaaagaactatagactgtggaatgcagtttaaagatgacatatgccaacaaatgccttgtattatatggcactgccgtaattcaaatttgtttttattttggaaataaaagttcactgtacttttttttcattctcattgttacatgattttttaaaaaaaggaaaagaaaatgtgaaacacaatttagtcctcattatttatttgtagatcctgcagcatcatgttgtaattaattttttggaagtttccgttaaatgtaatattgcttctcttgttaccatactgattcttttctatttataaatgtattttgatgggcagtaaaacaaagtgtcttaaaagttttaaatagagaaaatgtgctttacacagttgcctataaaaagtgctctatgttatccaagcaattcatactataagcttcactcttattgttgtatgcaatttttactatcatgcaaataaggcttaggtaaataaaacttataggatcaccttagaaaattatgcaattaatgtgaaaataattgatgtttgcaatgtgtcttcctttggtttacaatcaattttaaagctacatctgtataaaatttctgtataaaggtgtatttcttttttatgagtttatgggctatgaaaaccagctattttgttaccagcatgggctgtttttgtataaagtggtatcacaaattgttcnntntatgccaggaaaatggttcntgacntagggaggtgggtttatttggacctggtnaacttaccacnaatntaaagaatttggtttnggtnatccggtaattggaaaaaanaananagaa

SEQ ID NO: 634 - DNA, 428 bp; single-stranded, linear
  immediate source library: THYMNOT02
  immediate source clone: 345409
ccagaattcccactccaaaagcccaagctctgcagccctgcagtgtggttttgctccatctggagagaacctcacacagactnccctgccaaaatgatgtaacatgatgactcagggatgtgagcgtgagaggaaccaacatttagttcttatacccacatatgctgtgtgttgtgtgattaggtttatttaatgaacttaatgcaagctgagaggcttgacaaaacgtccccttttgtggactgaagtagctatctttcagagaaagcatgcagatttagttggtgttaggttgtttatgttgaataaaaatctatttaaagacctggctgaagtgcattcagcctttcactgtctgcacttacaattaaaaagaaagattttattatgcatgacagagatccagattcttagagattgcctctttc

SEQ ID NO: 635 - DNA, 1150 bp; single-stranded, linear
  immediate source library: THYMNOT02
  immediate source clone: 345472
ctggaggcgatccagctggacggggagatccttttctcgctgttgcagaaggtgtcgccggtggcccacaagcacctcagccgtcagaagatcgacccgctcctctatatgacagaatggttcatgtgcgccttctcccgaaccttgccctggagctctgtgctgcgtgtctgggacatgttcttctgtgaaggggtcaagatcatcttccgggtggggctggtgctgctgaagcacgcgctgggctcccctgagaaggtcaaagcctgccagggccagtacgagaccatcgagcgactgcggacctcagccccaagatcatgcaggaggcctttctggtccaggaggtggtggagttgcccgtgacagagcgccagattgagcgcgaacacctcattcagctgcggcgctggcaggagacccggggtgagctgcagtgccgctccccgcccaggctgcatggtgccaaggctatcttggatgcagaacctggnccccggcctgccctacaaccttcaccatccatccgcctgcccctagangcccccctccctggctccaaagccaagcccaagccacccaagcaggcccagaaggagcagcggaaacagatgaaggggagagggcagctggagaagcccccagccccaaatcaagccatggtggtggccgctgcaggagatgcatgtcccccacagcatgtgcccccgaaggactcagcccccaaggactcagcccctcaggatttggctccccaggtctcagcccaccaccgctcccaggagagcttgacgtcccaagagagtgaggacacctacttgtaaccctggcagctaaggcctccagggcggggtctccatataactacacggttcatgaactgacattccacatcctgcccaccctctgagggccaagctgcctggccactgggctgggctggagtctggctggtccaacacagattctgcctggtccaacacagattctgcctgagcctccttatttattttctttacagtggcactcaggctggcccagccagggcaggcagaagctagggcctggggggtggggcctccttcagccccctcctcctgggggatgctccccagggttagggtgctggtgtgaggggaaagggtggggt

SEQ ID NO: 636 - DNA, 177 bp; single-stranded, linear
  immediate source library: THYMNOT02
  immediate source clone: 346439
catccgggatatgattgccttataatgttttgaggtgtgggctgtggcatttacatgcttagggctttgtcagtttttggatatttatcttgtggtgaggtaaagtgttctgagcaaacaaaatgtatgtgagtgtagtctttttaccggctattgtagagtgggcattttcagtct

SEQ ID NO: 637 - DNA, 1492 bp; single-stranded, linear
  immediate source library: THYMNOT02
  immediate source clone: 346597
ggaagagctcaggaagcagcgggaggagatcactgccattgtgaagatgcgcgtggctggcactgccagtgggacccagcatgccggtgacttcatctgcacagtgtatctggaagagaagaaggcagagactgagcagcatatcaaggtcccagcatccatgactgctgaggagctcaccctggagatcctggatcgccggaacgtgggcatcagggagaaggactattggacctgctttgaggtcaacgagagggaggaggcagagcgccccctgcactttgcggagaaggtgctgcccatcctgcacgggctgggcacggacagccacctggtggtgaagaagcaccaggccatggaggccatgctgctgtacctggccagccgtgtcggtgacaccaagcatggcatgatgaagttccgtgaggaccgcagcctcctgggcctgggcctgccctcaggtggcttccacgatcgctacttcatcctcaacagcagctgcttgcggctctacaaggaggtccggagtcaccggcctgagaaggagtggcctattaagagtctcaaagtctacctgggagtgaagaagaaactcaggccacccacctgctggggcttcacagtggtgcatgagacagagaaacatgagaagcagcagtggtacctctgctgtgacacacagatggagctccgggagtggttcgctacctttctgtttgtgcagcatgacggcctggtgtggccctcagagccctcacgcgtgtcccgggcagtgcctgaggtccggctgggtagtgtgtcactgatcccccttcgaggtagtgaaaatgaaatgcgccggagtgtggctgccttcaccgcggaccctctgtctcttctgcggcaacgtctgaggcacaggagcccatccttggctctaggattccgccgctggaagccttctgttcagacaccccttatgctccaaggcctgatgtgagccagcggggggtgcatgggaaactgcaccccacaacccacatcctccatcctgactgcagcatggggttccccggcaggggtgggaggcagcaggggtcagcctgggcaggaacctctcccaactctgtccaggtgttcagacctcttggcccaacctgctcaccccaccgggttcactgtccttgtggggctggagagatgggcataagtcaggaacttgggaggaccaccaccctttcagaggcgtgaggccctggggccctgccggaagggagccccctgctcctcccaacaaactccagaacagcagaaagcgggtgctgtagaggagcactcagctcacggggagggagctcttggctgagcttctacagggctgagagctgcgctttggggacttcagccttccttccagtctgggctgagtggggggtccagactacctgatgccccttccccaatttggggactttttgataatataaatatatctgtatattttaccctaaaa

SEQ ID NO: 638 - DNA, 529 bp; single-stranded, linear
  immediate source library: THYMNOT02
  immediate source clone: 346869
cgcggcgtcgctccctacaactggcccgtgtggctgggcgtgcacgatcggcgcgccgagggcctctacctcttcgaaaacggccagcgcgtgtccttcttcgcctggcatcgctcaccccgccccgagctcggcgcccagcccagcgcctcgccgcatccgctcagcccggaccagcccaacggtggcacgctcgagaactgcgtggcgcaggcctctgacgacggctcctggtgggaccacgactgccagcggcgtctctactacgtctgcgagttccccttctagcggggccggtaccccgcctccctgcccatcccaccacccggcctttccctgcgccgtgcccaccctcctccggaatctcccttcccttcctggccacgaatggcagcgtcctccccgacccccagtctgggcgcttctgggagggctcttgcggtgccggcactcctccttgttagtgtctttccttgaaggggcgggcaccaggctaggtccggtgccaataaatccttgtggaatctga

SEQ ID NO: 639 - DNA, 294 bp; single-stranded, linear
  immediate source library: THYMNOT02
  immediate source clone: 347184
gtatgcttgcgttgttcatcgctgaaataagccggaacggagatcaccacatctttaatcggacgttgcagaaattcttcggcatcttcttttaatgagcgtaataccaaagaggacagttctggcgcgttaaatgtgtcgntgcctaaccgccagttggtattactgcccattgcacgtttaaataacgctgccgttttatccggatgcgaagtacgccgtgatacagccggttttccgactaaaatatgattattttcatccatgctaattatggatggngntaaatattca

SEQ ID NO: 640 - DNA, 371 bp; single-stranded, linear
  immediate source library: HMC1NOT01
  immediate source clone: 3490
atcttggtaaattcaccctgtttcctagtgctgctggataaaagagtgtttactttttattgctcttagacagagtagtctagataagttttcaatttatcaacatagcctagacttctgtaagtggaatgttcattagtaactcatctttttgttgttataattggaaacagaaacgaggcttattgctattgcagaaatcccaaactggcaaaggccagtatatatggtattccataatataaccagcttttgaaatttatgtgtttggattagtgccttctggttaccagtattgactctgctagtttgcaccttttccgttcttaacagaaaatttgtattttgttattcccccttaaattttgtcg

SEQ ID NO: 641 - DNA, 725 bp; single-stranded, linear
  immediate source library: LVENNOT01
  immediate source clone: 349715
ggcatctggtttctaaaaatttatttgaaacaatctagaattttcttggtgcaaagtgtatcatgtggaatatcctcatatttttaccatattttaagaactttaagacgattaattgtaaataatttatttgattggtgcagttctaatccctaaatcataatcttaaaatcaggaatgtgtggagaacagagccatgtcatatcactttgctcttaccattccttttgatcagcctcaattcagcctcattgtgtagtatgttttttctttctatgaaaaacaacagaaagcatttcattttatttgcctatgttcaaatatgtttaataatgaccaaagtgcattctgagttttttcaaggaatgtaatactggagctttaagaacatacttagtttctcatgtgaaaacttaggctttgtctgatgtttttccttcctctattgtctaatgttgaggttgtttttaggaattatgttttataaactttttcaatataaggtacatgcctatacagaacttaacattttgcacagaatatatcaaatatattttgagaaaaaaagtacggcatgagttctgttaggaataaaagatgaaactattgtatctcacaaaaaatcttatttcagaatggaaatatttttgagaaaagtagctgagtatactggtttaagaaaatgcttgttttagattgaggttaacttagagttgggagttgac

SEQ ID NO: 642 - DNA, 1700 bp; single-stranded, linear
  immediate source library: LUNGNON03
  immediate source clone: 3518373
ggcaaaggtgacaagaaggccgaagacaaagggaagctgcacccattcctggaggagcttaaatagtgactcgagtgcaagaatttaaaaataccgagacagccctaggtggaaaacttccggaaggcccaagcgttcgtaagggctctctaccccgctcggagcatagatggtaccgtccggaagtccgggcggagaccgtagctgcgcttctcgcgaaagggcaggcatcgcggggctggccacttccgtacttccgctttccggcccagccagcgcccgcgatgactgccactctccgcccctacctgagtgccgtgcgggccacattgcaggctgccctctgcctggagaacttctcctcccaggttgtggaacgacacaacaagccggaagtggaagtcaggagtagcaaagagctcctgttacaacctgtgaccatcagcaggaatgagaaggaaaaggttctgattgagggctccatcaactctgtccgggtcagcattgctgtgaaaacaggctgatgagatcgagaagattttgtgccacaagttcatgcgcttcatgatgatgcgagcagagaacttctttatccttcgaaggaagcctgtggaggggtatgatatcagctttctgatcaccaacttccacacagagcagatgtacaaacacaagttggtggactttgtgatccacttccatggaaggagattgacaaggagatcagtgagatgaagctgtcagtcaatgcccgtgcccgcattgtggctgaagagttccttaagaatttttaaaccatctggctggatctcgtggccttccccctcagactacccatgtctccacgaaggcgtcctggagtcactcccccngaagnctagttgcggtcggcggcagggagttgggttggggtgggcatttgatgcgggaggtgggtggtgtgcttgctagctgggcaagaaagcagcagtggacctgccccaaggccacacgtgcctggtcaggctggcttctgatgttcagtcccctgggccgggacagattttttttaaacgtcttgaaacttaaactctgtgcttgtaggatactgtaacctttttgtctttntttttttttattttttaaacctccacctccagtggctgtgactggtcccagtgattatacgttattggttgctgtgggtctgggcgggcctggagccagaaggcgacttattttttctctcctatgccaccccaggtggggagggagggaggtttcagacttcagtttcttccttgcccttttattcccaagcctccttggccccagtataagtgttgggaactctctgccagcttcctgagttctgcctaaagatggccccccagcactggttggggacaagggccaaattggtgaccaccagtcatgcctaggacctggggcccaaaagccgggcaacctctggctaacccaaagggagggccattgggtgccctcccagttgagaggggccgctgtttcgccttgtccgtcagtgccagtgcctgtgccagaggtggcgaggtgagtcctccagagcttcctggccgggccctcctcctgcctgttctggctcctctgctcccacgctagctgtcccttttctgattctggtggatcctccctcccctaattaaagtctctttttgcccctttggggctgcatgagaaaa

SEQ ID NO: 643 - DNA, 1043 bp; single-stranded, linear
  immediate source library: ESOGTUN01
  immediate source clone: 3523611
gtgcagggtttggggaaaggaaggctggcttggcgagagggcangtttgcgggctttcgaccccttttncaaagancaacaaagagtccttncccaactnccaactnaaccccttttgggactangtgtggtggnttggaaccccttgggggaacctgttggttgggtcctnttaanacccgggagggtnttttggtaanggcctgtgccaatttttttttttatgggagctaggtactgagcgcgcgaggtgaggagttgtgcagggtttggggaaaggaaggctggcttggcgagagggcaggtttgcgggctttcgcccccttttccaaagaccaacaaagagtccttccccaactcccaactcaaccccttttggaactatgtgtggtggttgggaccctgtggcgcatccttgtcgctcgtgtccttctcatgcccggcgacgcgtctttgtggtaacgccctgctgccatctcttttcttctctctgcgaggatttggactggcagtgagaataagagacaacgattcacgtctactttctaggatgacttccatgtgctccatctcgcgcgtccctgagcatgttgaatttccaaatcctaaataagccgcgcggtgtagtttgtattatgttgcgtttctctttctgctttcctcgccctttctccatcatcctttaggctctacagagtgaaggtttaaatccaaggtcatggcaaaacatctgangttcatcgccagggctgtgatggtacaggaagggaacgtggaaagcgcatacaggaccctaaacagaatcctcactatggatgggctcattgaggacattaagcatcggcggtattatgagaagccatgccgccggcgacagagggaaagctatgaaaggtgccggcgggttcttcaacatgggaatggctcgcaanatcaacttttnattcggaaagaatcgggcaaatccnttgnaaggcttcttaggccttgggtgggcaccnattnggaacccccatccatttttttttccanctttttttttt

SEQ ID NO: 644 - DNA, 2862 bp; single-stranded, linear
  immediate source library: KIDNNOT25
  immediate source clone: 3534074
gttggtgcttctttttcatttggaggcaaactggttacgtttgagaatgtcagaatgccttctcatcagggagctgnnnnnnnnnnnnnnnnnnnnnntgtgttcattagtcaggttgtaacagaaaaggagttcctcagccgatcagaccaacttcagcaggctgtgcagtcacaaggatttatcaattattgccaaaaaaaaattgatgcttctcagactgaatttgagaaaaatgtgtggtcctttttgaaggtaaactttgaggatgattctcgtggaaaataccttgaacttctaggatacagaaaagaagatctaggaaagaagattgctttggccttgaacaaagtggatggagccaatgtggctcttaaagactctgaccaagtagcacagagtgatggggaggagagccctgctgctgaagagcagctcttgggagagcacattaaagaggaaaaagaagaatctgaatttctaccctcatctggaggaacatttaatatctctgtcaagtggggacattgatggtttaattactcaggctttgctgacgggcaattttgagagtgctgttgacctttgtttacatgataaccgcatggccgatgccattatattggccatagcaggtggacaagaactcttggctcgaacccagaaaaaatacttcgcaaaatcccaaagcaaaattaccaggctcatcactgcagtggtgatgaagaactggaaagagattgttgagtcttgtgatcttaaaaattggagagaggctttagctgcagtattgacttatgcaaagccggatgaattttcagccctttgtgatcttttgggaaccaggcttgaaaatgaaggagatagcctcctgcagactcaagcatgtctctgctatatttgtgcaggggaatgtagagaaattagttgcatgttggactaaaagctcaagatggaagccaccctttgtcacttcaggatctgattgagaaagttgtcatcctgcgaaaagctgtgcaactcactcaagccatggacactagtactgtaggagttctcttggctgcgaagatgagtcagtatgccaatttgttggcagctcagggcagtattgctgcagccttggcttttcttcctgacaacaccaaccagccaaatatcatgcagcttcgtgacagactttgtagagcacaaggagagcctgtagcaggacatgaatcacctaaaattccgtacgagaaacagcagctccccaagggcaggcctggaccagttgctggccaccaccagatgccaagagttcaaactcaacaatattatccccatggagaaaatcctccacctccgggtttcataatgcatggaaatgttaatccaaatgctgctggtcagcttcccacatctccaggtcatatgcacacccaggtaccaccttatccacagccacagccttatcaaccagcccagccgtatcccttcggaacaggggggtcagcaatgtatcgacctcagcagcctgttgctcctcctacttcaaacgcttaccctaacaccccttacatatcttctgcttcttcctatactgggcagtctcagctgtacgcagcacagcaccaggcctcttcacctacctccagccctgctacttctttccctcctcccccttcctctggagcatccttccagcatggcggaccaggagctccaccatcatcttcagcttatgcactgcctcctggaacaacaagtcctcagaatggttggaatgaccctccagctttgaacagagtacccaaaaagaagaagatgcctgaaaacttcatgcctcctgttcccatcacatcaccaatcatgaacccgttgggtgacccccagtcacaaatgctgcagcaacagccttcagctccagtaccactgtcaagccagtcttcattcccacagccacatcttccaggtggccagcccttccatggcgtacagcaacctcttggtcaaacaggcatgccaccatctttttcaaagcccaatattgaaggtgccccaggggctcctattngggaaataaccttccagcatgtgcagtctttgccaacaaaaaaaattaccaagaaacctattccagatgagcacctcattctaaagaccacatttgaggatcttattcagcgctgcctttcttcagcaacagaccctcaaaaccaagaggaagctagatgatgccagcaaacgtttggagtttctgtatgataaacttagggaacagacactttcaccaacaatcaccagtggtttacacaacattgcaaggagcattgaaactcgaaactactcagaaggattgaccatgcatacccacatagttagcaccagcaacttcagtgagacctctgctttcatgccagttctcaaagttgttctcacccaggccaataagctgggtgtctaaaaggacagcttctcttccactcaatattgccatttttccaaagaaacatgttaaaaaaaaaaattataagacatggactagtcctcattaggcatgtttgcatagcaaccagtcaagagcatttacactatttctgctgatatactcaccttagaactgctcagaaccctggtgctttatttttgttttaatcttttgttgccagtgatgattttcctattctgcaaatagtgtatttcctggattacacatagtatggtttcctgaagtattctgataaatgtgttttttaaaacctcaatatactttttagaaaaggagcatctggttatgcataaagcagagctaaaactaaatttctttcatgtcctccctacttcctcagtgtcaatcagattaaagtgtgtaatcctaaa

SEQ ID NO: 645 - DNA, 984 bp; single-stranded, linear
  immediate source library: SEMVNOT04
  immediate source clone: 3538629
ggagcgacgtgtcccccttcagcttccgcgaggtggcccccgagcagcccagcgacctccggataggcttctacccgatcaaccacacggactgcctggtctccgcgctgcaccatgcttcgacggncccacgggggagctggccaacgctttcttccccccgcacggcggcatcaacttcgacgacaacgatactggggtcttgggccccacgggtanaacttggaagaaaggctttggctcacggacttggtgcacntgggggccaacnanattgggnnaggcttcacctacaggatcctctccttcccgcggaacctgctgagcccgcgggagacgcggcgggccctagctgccgccttccgcatgtggagcgacgtgtcccccttcagcttccgcgaggtggcccccgagcagcccagcgacctccggataggcttctacccgatcaaccacacggactgcctggtctccgcgctgcaccactgcttcgacggccccacgggggagctggcccacgccttcttccccccgcacggcggcatccacttcgacgacagcgagtactgggtcctgggccccacgcgctacagctggaagaaaggcgtgtggctcacggacctggtgcacgtggcggcccacgagatcggccacgcgctgggcctgatgcactcacaacacggccgggcgctcatgcacctgaacgccacgctgcgcggctggaaggcgttgtcccaggacgagctgtgggggctgcaccggctctacggatgcctcgacaggctgttcgtgtgcgcgtcctgggcgcggaggggcttctgcgacgctcgccggcggctcatgaagaggctctgccccagcagctgcgacttctgctacgaattccccttccccacggtggccaccaccccaccgccccccaggaccaaaaccaggctggtgcccgaggnangaacgtgacttncgtncggnccanangntcct

SEQ ID NO: 646 - DNA, 971 bp; single-stranded, linear
  immediate source library: SYNORAB01
  immediate source clone: 358673
gcaactagggcccggagcccggggtgctggagggaggcggcaggcccgggtcaggggcctcgagatcgggcttgggcccagagcatgttccagatcccagagtttgagcccgagtgagcaggaagactccagttctgcagagaggggcctggggcccagccccgcaaggaacggggccctcaggctccggcaagcatcatcgccaggccccaggcctcctgtgggacgccagtcaccagcaggagcagccaaccagcagcagccattcatggaggcgctggggctgtggagatccggagtagccacagctcctaccccgcggggacgtgaggacgacgaagggatgggggaggagcccagcccctttcggggccgctncgcgctcggcgccccccaacctctgggcagcacagcgctatggccgcgagctccggaggatgagtgacgagtttgtggactcctttaagaagggacttcctcgcccgaagagcgcgggcacagcaacgcagatgcggcaaagctccagctggacgcgagtcttccagtcctggtgggatcggaacttgggcaggggaagctccgccccctcccagtgaccttcgctccacatcccgaaactccacccgttcccactgccctgggcagccatcttgaatatgggcggaagtacttccctcaggcctatgcaaaaagaggatccgtgctgtctcctttggagggagggctgacccagattcccttccggtgcgtgtgaagccacggaaggcttggtcccatcggaagttttgggttttccgcccacagccgccggaagtggctccgtggccccgccctcaggctccgggctttcccccaggcgcctgcgctaagtcgcgagccaggtttaaccgttgcgtcaccgggacccgagcccccgcgatgccctgggggccgtgctcactaccaaatgttaataaagcccgcgtctgtgc

SEQ ID NO: 647 - DNA, 119 bp; single-stranded, linear
  immediate source library: PROSNOT01
  immediate source clone: 361577
ccggttcggacccgcaagctccgcctaccgggggctnggcaggatgggcacggtactgaccagggacttcaggatggcgtggttggtggcgttcatgcaggagtccagcgggaaggagc

SEQ ID NO: 648 - DNA, 543 bp; single-stranded, linear
  immediate source library: SYNORAT01
  immediate source clone: 369126
agatctcttcaggggtactgccaggtagcaggctttattgggaagggacaaagcctcaggagctgggtgccccagaggctgctgggtcttgagccacagctgcagccaatgcagcagctcgcgcctccttcttccgtttctgtttttcctccttgaggcgcttgcgctccttcttctctaggtcctggagcagctcctggaagcgggcactccttgggtccacctggtagcccaggagctcctgggcctcagcctgcagtcgggccctcctctccttgtcagcctgggccttctcccagttctcccgctgctgctgctgccagttcacaatcatctgtggcatcttggccatgcactctgcgatgtgctgctccctctcccgacgcttcttgctcttcggccagctgcttcacccgcagcgactcctgcatggtcgcccaggctcgggtaccattcgcgttcttcggcctccagctccccgcagctgctccggcgacggccataacgaaccggggaccaccccggaggcggcgccgtaacgcg

SEQ ID NO: 649 - DNA, 942 bp; single-stranded, linear
  immediate source library: LUNGNOT02
  immediate source clone: 375230
cttccggctgccccgagtccggaaagagttcttccaggatgacgtgttcccagacacggctgtgatctgggagcctgtgctcagtgccgaggcctggctgcaaggcgctaatgggcagccctggcttctcagcctgcagcctcctgacatgagcccagtgagccaagccccccgagaggcccctgctcgtcgggccccatcctcagcgcagtacctggaagaaaagtctgaccagcaaaagaaggaggagctgctgaatgccatggtggcaaaactggggaaccgggaggacccactcccccaggactcctttgaaggcgtggacgaggacgagtgggactagcctgcgcccccgtcacctccacctcacctgtgctgccacttcctagtgcacacctcacggctcatcctcaagctggaagatacctctctggccccggcacatgtcacccctgcactcctgccttcccgtgggcacttccacatcctctgggcctctggcagttcccagggactgttttcacctctgctgtctctggggtcagctgctgcttcatcagctgcccgctagcatgtggccaggggtgcagggtggcggggggtcagcagcatgtccctgggcaggccctggggcaccctgtctcccctggtctcactgctgacctgggctggtcccagcctggattggcctcatccaggatctttggtcaccccacgctgccccatcttgcctgctgttccagttctggtcaagggccttgggggctggccccccaccaggccttctagagcagcaccagtctcagggccctgggaccagctgccctacttcccaggtttgtagccaggagaagggggcatcacagagctgatggtccaataaggggggtgtgagccccgcaggactggcccgcacctgccttggatgttttcagcaattaa

SEQ ID NO: 650 - DNA, 1640 bp; single-stranded, linear
  immediate source library: NEUTFMT01
  immediate source clone: 375755
gcccgagctgcgtcagttcctgggcaagagggagcgggtggacttcgccgattcggtcaccaagtacgaccgccgcttcaagcccatcaagcgggacttgatcctgacgcccaagtgtgtgtatgtgattgggcgagagaaagtgaagaagggacctgagaagggccaggtgtgtgaagtcttgaagaagaaagtggacatccaggctctgcggggagtctccctcagcacgcgacaggacgacttcttcatcctccaagaggatgccgccgacagcttcctggagagcgtcttcaagaccgagtttgtcagccttctgtgcaagcgcttcgaggaggcgacgcggaggcccctgcccctcaccttcagcgacacactacagtttcgggtgaagaaggagggctggggcggtggcggcacccgcagcgtcaccttctcccgcggcttcggcgacttggcagtgctcaaggttggcggtcggaccctcacggtcagcgtgggcgatgggctgcccaagagctccaagcctacgcggaagggaatggccaagggaaaacctcggaggtcgtcccaagcccctacccgggcggcccctgcgccccccagaggcatggatcgcaatggggtgcccccctctgccagagggggccccctgcccctggagatcatgtctggagggggcacccacaggcctccccggggccctccgtccacatccctgggagccagcagacgaccccgggcacgtccgccctcagagcacaacacagaattcctcaacgtgcctgaccagggcatggccggcatgcagaggaagcgcagtgtgggcaacggccagtgcctggatgtgggccgacccaagccccagcctcggacacatggtcccaggtgccgggccctataccagtacgtgggccaagatgtggacgagctgagcttcaacgtgaacgaggtcattgagatcctcatggaagatccctcgggctggtggaagggccggcttcacggccaggagggccttttcccaggaaactacgtggagaagatctgagctgggccctgggatactgccttctctttcgcccgcctatctgcctgccggcctggtggggagccaggccctgccaatgagagcctcgtttacctgggctgcaatagcctaaaagtccagtcctttggcctccagtcctgcccaggccctgggtcaccaggtcactgctgcagcccccgcccctgggccctggtcttcctccaacatcacacctgctgcccattctccatttctgtgtgtgtcaaaggggactaacagcagaatctacctcccaactgccatgtgattaagaaatgggtcttgagtcctgtgctgttggcaaagtgccaggcacagttggggaggggggggtccttaacaagcgtgactttgctcattctgtcatcactaaggcaataaacctttgccaggtgannnnnnnnnnnnnnnnnnnnnnnnnnnnnnnnnnnnnnnnnnnnnnnnnnnnnnnncttcgggggggggcccggttccnanttggncctttgggggggcgtttanatttcactggnccggngttttaaacggggggctnggggaaancctgggggttncccannttattggcttg

SEQ ID NO: 651 - DNA, 257 bp; single-stranded, linear
  immediate source library: NEUTFMT01
  immediate source clone: 377250
acctgagcccttgtggccttgcagaatcaacggttagaagatgactcatttggttagttctaaaatatgcccagatgttaagtcccatgtgtgcatatccccccaccaccaatttgaagaaattgtctacattttcctttgtgtggctccaatgttttttgttgtgcggctattctaggtgttttgtattttaatataagatgtgctcatcaatttctacaataaacttgagattttgaaaanaaaannaaaaaaaa

SEQ ID NO: 652 - DNA, 1647 bp; single-stranded, linear
  immediate source library: NEUTFMT01
  immediate source clone: 377292
caccgcctctcactggacctgctgagccaaatgagcccaggggacctggccaaggtgnggcgtctccagnaagctgggcctggcagcacgnagatccctnccggnagnagttccagngaaactggcttggnattgcaagcccagngnatccncagnccaagnagcctcgaancacccaanccaaaatgggggntggaancgttccgttgcaactcccccttaaccgcgnctcncncncncaagggcagcaaatggatcagaacaaagccatcagccagatcctgcaggagagcgcgatgcagaaggctgcgttcgaggcactccaggtgaagaaagacctgatgcatcggcagatcaggagccagattaagttaatagaaactgagttattgcagctgacacagctggagttaaagaggaagtccctggacacagagtcactccaggagatgatctcggagcagcgctgggccctcagctccctgctccagcagctgctcaaagagaagcagcagcgagaggaagagctccgggaaatcctgacggagttagaagccaaaagtgaaaccaggcaggaaaattactggctgattcagtatcaacggcttttgaaccagaagcccttgtccttgaagctgcaagaagaggggatggagcgccaactggtggccctcctggaggagctgtcggctgagcactacctgcccatctttgcgcaccaccgcctctcactggacctgctgagccaaatgagcccaggggacctggccaaggtgggcgtctcagaagctggcctgcagcacgagatcctccggagagtccaggaactgctggatgcagccaggatccagccagagctgaaaccaccaatgggtgaggtcgtcaaccctacggccccccaggagccttctgagtctgtgaggccatccgctccccctgcagagctggaggtgcaggcctcagagtgtgtcgtgtgcctggaacgggaggcccagatgatcttcctcaactgtggccacgtctgctgctgccagcagtgctgccagccactgcgcacctgcccgctgtgccgccaggacatcgcccagcgcctccgcatctaccacagcagctgagtgctgcccgcccacctgggcctggtcctagccctgcctcggccactgtgagccccgggctcctgctcagccttgtgccagccagactcgtatgaggctcccccctgccctgggccccttncccactgcccaggagcccccatcctaagctccaagcatgtctgggccaggcagaggtgctcctcatccatgacaccaccagtctgaatggtcctgggggctggggctggagaggccgctgcaccaccacccgagcctgggagccagcgtcccagcctaatcacggatctgctgcctcccagctgtcttgactgaaggccaccgcccctgcaggagcttgggtcctcatctgggggccatgcacaggcccgtcccaccctgcatgtgggaagggagcaggagggcctggctgggtgaggggaggccttcctgggaaggcgtgtggtgcaggcctgtgctcacagtggcaccagcaaccctgggtctccctctctgctgctccccagaaccccggggccctcctgctctccac

SEQ ID NO: 653 - DNA, 169 bp; single-stranded, linear
  immediate source library: NEUTFMT01
  immediate source clone: 380124
ggatggggggctgcacgtagatggggtggcagtgaccctcacttcctgctgtatccccagacccaaaggcacagctagatgtgagccatgtcatctgcacctagtctctctccagctctcagctcttcctctgggtgaatttcactcctgggcaaacccctctgatggg

SEQ ID NO: 654 - DNA, 1614 bp; single-stranded, linear
  immediate source library: HYPONOB01
  immediate source clone: 383060
ggtctttcgagtgtatgccagcaatcaagagtttgagagcgtccggctgaatgagacactttcatcattttctgatgacaataagattacaattagactggggagagcacttaaaaaaggagaatacagagttaaagtataccagcttttggtcaatgaacaagagccatgcaagtttctgctagatgctgtgtttgctaaaggaatgactgtacggcaatcaaaagaggaattaattcctcagctacagggagcaatgtggtttagagctcagtattgacaggtttcgtctaaggaaaaaaacatgggaagaatcctggcactgtctttttggattatcatatttatgaagaagatattaatatttccagcaactgggaggttttccttgaagttcttgatggggtagagaagatgaagtccatgtcacagcttgcagttttgtcaagacggtggaagccttcagagatgaagttggatcccttccagggaggttgtattgggaaagcagtagtgtggacgaattgcgagagaagcttagtgaaatcagtgggattcctttggatgatattgaatttgctaagggtagaggaacatttccctgtgatatttctgtccttgatattcatcaggatttagactggaatcctaaagtttctaccctgaatgtctggcctctttatatctgtgatgatggtgcggtcatattttatagggataaaacagaagaattaatggaactgacagatgagcaaagaaatgaactgatgaaaaaagaaagcagtcgactccagaagactggacatcgtgtaacatacttcacctcgtaaagagaaagcactaaaaatatatctggatggagcaccaaataaagatctgacttaaagactgactctgatagtgtagcattttccctgggggagttttggttttaattagatggttcactaccactgggtagtgccattttggccggacatggttggggtaacccagtgacaccagcactgattggactgccctacaccaatcagaagctcagtgcccaatgggccactgttttgactcggaatcatgttgtgcactatagtcaaatgtactgtaaagtgaaaagggatgtgcaaaaaaataaaaaaaaacaacaaaaaaagctaaccttctattagaaaaggggacaggggaatgagtaaacttcttttattgcggacaaatgtgcacatagccgctagtaaaactagcctcaaacaggatgctcatagcttaataataaaagctgtgcaaaggccatgaatgaatgaattttctgtttatttcactgatgcacacattacctcattgacaattcagaagtaaatccaacgtgtgttgactcttggaaagcagcaaaaacaggagctgaagaaaagaaattcttggaaccagccgtaacccagtaaggaattgtgaagttgtgtttttattttgtttcattttttgcagagtattaagaacattattctggaacatcagaacgtttcccttagaccgatcccagcaggtggcagctcagattgctgcagtgttgtaattataactgattgtacttaagttatggatgtagagaatatgtttcat

SEQ ID NO: 655 - DNA, 2491 bp; single-stranded, linear
  immediate source library: HYPONOB01
  immediate source clone: 383280
cggagatgtagacccggtagtgttgtgccttgtggtgacaactggcggcagcgcgccgcgggcccgagacttagtctcgggccgccatggccagcgtccacgagagcctctacttcaatcccatgatgaccaatggggttgtgcacgccaatgtgttcggcatcaaggactgggtgacgccgtacaagatcgcggtgctggtgctgctgaacgagatgagccgcacaggcgagggcgccgtcagcctcatggagcggcggaggctcaaccagctgctcctgcccctgctgcagggcccagatattacactgtcaaaactttacaagttaattgaagagtcttgtccacagctggcaaattcagtgcagatcagaatcaaactgatggctgaaggcgagttgaaggatatggaacagttttttgatgacctttcagattctttctctggaactgaaccagaggttcacaaaacaagtgtagtaggtttgtttctgcgtcacatgatcttggcctacagtaagctttctttcagccaagtgtttaaactgtacactgcccttcagcagtacttccagaatggtgagaaaaagacagtggaggatgctgatatggaactgaccagtagagatgagggtgaaagaaaaatggaaaaagaagaacttgatgtatctntaagagaagaggaggtatcttgcagtgggcctctgtcccaaaaacaagcagaattttttctttctcaacaggcttctttgctaaagaatgatgagactaaggccctcactccagcttccttgcagaaggaattaaacaatttgttgaaatttaatcctgattttgctgaagcgcattatctcagctacttaaacaacctccgtgtccaagatgttttcagttcaacacacagtctcctccattattttgatcgtctgattcttaccggagccgaaagcaaaagtaatggggaagagggctatggccggagcttgagatacgccgctctgaatcttgccgccctgcactgccgcttcggtcactatcaacaggcagagctcgccctgcaggaggcaattaggattgcccaggagtccaacgatcacgtgtgtctccagcactgtttgagctggctttatgtgctggggcagaagagatccgatagctatgttctgctggagcattctgtgaagaaggcagtacattttgggttaccgtacctcgcctccctgggaatacagtcccttgttcaacagagagcttttgctgggaagacggcaaacaagctgatggatgccctaaaggactccgacctcctgcactggaaacacagcctgtcagagctcatcgatatcagcatcgcacagaaaacggccatctggaggctgtatggccgcagcaccatggcactgcaacaggcccagatgttgctgagcatgaacagcctggaggcggtgaatgcgggcgtgcagcagaacaacacagagtcctttgctgtcgcactctgccacctcgcagagctacacgcggagcagggctgttttgctgcagcttctgaagtgttaaagcacttgaaggaacgatttccgcctaatagtcagcacgcccagttatggatgctatgtgatcaaaaaatacagtttgacagagcaatgaatgatggcaaatatcatttggctgattcacttgttacaggaatcacagctctcaataggcatagagggtgtttataggaaagcggttgtattacaagctcagaaccaaatgtcagaggcacataagcttttacaaaaattgttggttcattgtcagaaactgaagaacacagaaaatggtgatcagtgtcctactgtccgtggcagagctgtacttgcgatcttcctcccctaccatcgcgctgccccatgctcctgcaggctctgggcctcttccaaggagtaccggttacagtacttggcctctgaaacagtgctgaacttggcttttgcgcagctcaattcttggaatcccagaacaggccttaagtcttctccacatggccatcgagcccatcttggctgacggggctatcctggacaaaggtcgtgccatgttcttagtggccaagtgccaggtggcttcagcagcttcctacgatcagccgaagaaagcagaagctctggaggctgccatcgagaacctcaatgaagccaagaactattttgcaaaggttgactgcaaagagcgcatcagggacgtcgtttacttccaggccagactctaccataccctggggaagacccaggagaggaaccggtgtgcgatgctcttccggcagctgcatcaggagctgccctctcatggggtacccttgataaaccatctctagagaggacatccctgctgggctgctgtgcagagtataagattttggacttgttcatgtcccctctctccctataaatgatgtatttgtgacaccctatcttgtcaataaacagcattctgattagtttgtctt

SEQ ID NO: 656 - DNA, 1936 bp; single-stranded, linear
  immediate source library: THYMNOT02
  immediate source clone: 388684
ctccattgcaaatagtaagaccagcaataccctagagaaggatttagatctgttggcctctgttccatccccttcttcttcgggttccagaaaggttgtaggttccatgccaactgcagggagtgccggctctgttcctgaaaatctgaacctgtttccggagccagggagcaaatcagaagaaataggcaagaaacagctctctaaagactccattctttcactgtatggatcccagacgcctcaaatgcctactcaagcaatgttcatggctcccgctcagatggcatatcccacagcctaccccagcttccccggggttacacctcctaacagcataatggggagcatgatgcctccaccagtaggcatggttgctcagccaggagcttctgggaatggttgcccccatggccatgcctgcaggctatatgggtggcatgcaggcatcaatgatgggtgtgccgaatggaatgatgaccacccagcaggctggctacatggtcaggcatggcagctatgccccagactgtttatggggtccagccagctcagcagctgcaatggaaccttactcagatgacccagcagatggctgggatgaacttctatggagccaatggcatgatgaactatggacagtcaatgagtggcggaaatggacaggcagcaaatcagactctcagtcctcagatgtggaaataaaaacaaaacacctgtatggctgccattctcttcagccctcgctctcccctttccacagcctccacccctgacccccatcctcttttcctacctctctgtttggtttagaaattgctcaataagtcatttggggtttggcatcctgcccagccacttcccaaacatgaagacctctctgttgctttatgttgtacatgccccatagccatcccaacgtcctccccagtcctctcctggcaccagcaccttagaagttgttggcagaaggcacttaaactgtgggagaagtgtgcacacctttgagtcccttccctcaaggttaaagctcctgtcagactctcagaagggtctgtgggtgttgtatattaggccaaacaggggaaagcttagaggtccttctatatgtgttaataagctgtttctaagtgtttaaatttgaaaagcatcatgttctcatgatttatgggaatgaagcaagtactgaaatcaaattaaatactccctgggtcctgggtcagtttgaccctagccctggggtgaggcaagccccctcctatgaggatgagcaaaaatactactctcttcgccctgagttgctttctggatctggggcttcaggacttgctgcttcagtcagcctttattagcaccaaagactttatgaagatcccacacacagacacacatcccttcccgcctcccccctgccttcagtaggatctggctccgtggctggaggaccaacccctatagtgggaatgcaagagcttaacggtgtactgcttgtntgtgtgcgtgagtntntgtgtgtgtatgagtgtgtggttccgcctcccaccctctccccatcttgctctgggtatttttgtttttgtttagttttaggtttacaacagagagggaattaatttatcagcagcctaaaactgttgtgtttttcttatggtttaaaaaacgccatgtcattgataactccctttctcccttcccttctcccggtctgctgatcactctttcatgcctgtgtatccagggtgctctgtttccccaccgttcccaggtgtacgaggcagagggccgggacagctttcctctcagtcattgttcaccccacttgaaaattcagacaagaaaactttgcttaaaagatttcatgtgtgggaaccacagttcctggctgcctttctcctgtgtatgtgtaaattccttaataaatattgcagggaaggac

SEQ ID NO: 657 - DNA, 730 bp; single-stranded, linear
  immediate source library: THYMNOT02
  immediate source clone: 389702
cgggacgcgtgggcgggattacaggtgtgtgtcactgtgcctgacagctgacagttttaactgacaactttgataacagaggctgctatttttgttttagataattggccagtgacagagtttacccttgcctcctttcttggtctgccagctttgtcctttctgagtgattctctttctgtattgagaggaagtgtgggtctacatagggatgtttggatgctatggcaagaatctttttgtgtttggagtgtagtccatttgcaatagaaataaaaaaatccgtcaccaaattgtaacctggatgttatagcccagcatctaggaaatcctatgaaatgtattagcacaatatcttgccattgtcccatctaggaaattttttcttgttgtgaggtagggaagtgaggaggaaagccatgccgaagcaaatgttagaatcttaggcatcctatttgttcatgccatgggtatttgctttggacttggagtctgtactttgaaagaggcctttgaaaaacaaataattctgtgtgaattttcttgtagcgtgcttcatgaaaatatctacttatccaggtttgcaaatgtacatgttcatttgaatgtaaatcaccatttcttggaaccccacgttttttcttaaaaattattctgaattaaatgtatatttctttagccttccctacacagtactaataaaagacttttctttctgttcatgaatgga

SEQ ID NO: 658 - DNA, 194 bp; single-stranded, linear
  immediate source library: TMLR2DT01
  immediate source clone: 390602
gctgtatgtttttattatatactatgagataatgagattagtgatggattgctttgtaatactttgggagtctgggtttggcagagtgtgcccctatgaagactaagtgggactataatgattgtgttttcttaaatcagaatcaggatgcataaccagatgaaggaagacatagtcgggagccatagttttaa

SEQ ID NO: 659 - DNA, 1587 bp; single-stranded, linear
  immediate source library: TMLR2DT01
  immediate source clone: 394012
atagtccatttaatttcagcttaaccttttaaatgatctgtaaaatttctttganagtttaggaatgttgtggggagggttcattaataaaagttcagcaattttttaactgaaatagtttatctcttttacctagtcacaaaaaaggtatgtaaacaaggccattatatgtgtttattgctctttatttccctatctagattttctaagtatcttagctttcttaatataagtttaacttggtacttactgaaaatgcctttttacccctgttaacggtattttgagcttttgaaaagaacttggttgacactgcttttattgtggataaaggagagatggtcagtaattaatggcttgaagtattattggagtggtttatcatttctgaaactaatcgtgtcagaattgactttgaaaagcattgctttttacagaaatatattaactttttaggagtaatttctagtttggattgtaatatgaaataatttaaaagggcttcgctcatatataggaaaatcgcatatggtcctagtattaaattcttattgcttactgatttttttgagttaagagttgttatatgctagaatatgaggatgtgaatataaataagagaagaaaaaagaataaagtagattgagtctccaattttatgtaagcttcagaagaactggtttgtttacatgcaagcttatagttgaaatatttttcaggaattacatgaatgacagtcttcgaaccaatgtgtttgttcgatttcaaccagagactatagcatgtgcttgcatctaccttgcagctagagcacttcagattccgttgccaactcgtccccattggtttcttctttttggtactacagaagaggaaatccaggaaatctgcatagaaacacttaggctttataccagaaaaaagccaaactatgaattactggaaaaagaagtagaaaaaagaaaagtagccttacaagaagccaaattaaaagcaaagggattgaatccggatggaactccagccctttcaaccctgggtggattttctccagcctccaagccatcatcaccaagagaagtaaaagctgaagagaaatcaccaatctccattaatgtgaagacagtcaaaaaagaacctgaggatagacaacaggcttccaaaagcccttacaatggtgtaaggaaaagacagcaagagaagtagaaatagcagaagtgcaagtcgatcgaggtcaagaacacgatcacgttctagatcacatactccaagaagacactataataataggcggagtcgatctggaacatacagctcgagatcaagaagcaggtcccgcagtcacagtgaaagccctcgaagacatcataatcatggttctcctcaccttaaggccaagcataccagagatgatttaaaaagttcaaacagacatggtcataaaaggaaaaaatctcgttctcgatctcagagcaagtctcggggntcactcangatgcagccaagaacacaggcatgaaaggggccatatngggccaggcgtnaccgtctttgtccctttgagngggcccttaaaggaagaccctt

SEQ ID NO: 660 - DNA, 1229 bp; single-stranded, linear
  immediate source library: HMC1NOT01
  immediate source clone: 3945
tatgtatgatcctgtctggtcaagctgctgacaatttaagggcaaaatggaatttttcaactttatgtgttcgcagaatttttagccttataggaatgattggacctgcagtattcctggtagctgctggcttcattggctgtgattattctttggccgttgctttcctaactatatcaacaacactgggaggcttttgctctttctggatttagcatcaaccatctggatattgctccttcgtatgctggtatcctcctgggcatcacaaatacatttgccactattccaggaatggttgggcccgtcattgctaaaagtctgacccctgataacactgttggagaatggcaaaccgtgttctatattgctgctgctattaatgtttttggtgccatttnntttacactattcgccaaaggtgaagtacaaaactgggctctcaatgatcaccatggacacagacactgaaggaaccaataaataatcctgcctctattaatgtatttttatttatcatgtaacctcaaagtgccttctgtattgtttaagcnttctatgtctttttttaattgtacttgtattagatttttaaggcctataatcatgaaatatcactagttgccagaataataaaatgaactgtgtttaattatgaataatatgtaagctaggacttctactttaggttcacatacctgcctgctagtcgggcaacatgaagtaggacagttctgttgattttttagggccatactaaagggaatgagctgaaacagacctcctgatacctttgcttaattaaactagatgataattctcaggtactgataaacacctgttgttgttcactttcctcataaaaattgtcagctctctctgacacttagacctcaaactttagcatctctgtggagctgccatccactgtataatttcgcctggcaactggactgaggggagtgtgcccaggcagctgccaagcactccctccctggcttcagggtcagagtgcccagcgtttatcagaggcagcatccaagcccagagccagtgtcgactcttcggctggtgcctttcctctgaggggctatcaatgtgtagataaagccctgagtaggcaagagcatgagatccactgctatggtcttgatacatcctcaaactttcccttcccagcacagaggaatattggctggcatgcaacctgcaaaagaaaaatgcgaagc

SEQ ID NO: 661 - DNA, 1879 bp; single-stranded, linear
  immediate source library: TMLR3DT01
  immediate source clone: 400581
atagagaataggtcaaagaaagatttgattcaaatgttagtccagagaggttatgaatctgacccagtgaaagcctggaaagaagcacaagaaaaggcagcagaagaggatgaaacacaaaaccagcatgatgatagttcctccgattcaggaactccttcaggcccagattttaattatattttaaatatgtctctgtggtctcttactaaagaaaaagttgaagaactgattaaacagagagatgcaaaagggcgagaggtcaatgatcttaaaagaaaatctccttcagatctttggaaagaggatttagcggcatttgttgaagaactggataaagtggaatctcaagaacgagaagatgttctggctggaatgtctggaaaagcaattaaaggtaaagttggcaaacctaaggtgaagaaactccagttggaagagacaatgccctcaccttatggcagaagaataattcctgaaattacagctatgaaggcagatgccagcaaaaagttgctgaagaagaagaagggtgatcttgatactgcagcagtaaaagtggaatttgatgaagaattcagtggagcaccagtagaaggtgcaggagaagaggcattgactccatcagttcctataaataaaggtcccaaacctaagagggagaagaaggagcctggtaccagagtgagaaaaacacctacatcatctggtaaacctagtgcaaagaaagtgaagaaacggaatccttggtcagatgatgaatccaagtcagaaagtgatttggaagaaacagaacctgtggttattccaagagattctttgcttaggagagcagcagccgaaagacctaaatacacatttgatttctcagaagaagagnnnnnnnnnnnnnnnnnnnnnnnnnnnnnnnnnnnnnnnttagaggaattgaaagttaaagcatctcccataacaaatgatggggaagatgaatttgttccttcagatgggttagataaagatgaatatacattttcaccaggcaaatcaaaagccactccagaaaaatctttgcatgacaaaaaaagtcaggattttggaaatctcttctcatttccttcatattctcagaagtcagaagatgattcagctaaatttgacagtaatgaagaagattctgcttctgtttttttcaccatcatttggtctgaaacagacagataaagttccaagtaaaacggtagctgctaaaaagggaaaaccgtcttcagatacagtccctaagcccaagagagccccaaaacagaagaaagtagtagaggctgtaaactctgactcggattcagaatttggcattccaaagaagactacaacaccaaaaggtaaaggccgaggggcaaagaaaaggaaagcatctggctctgaaaatgaaggcggattataaccctgggcaggaaaacatccaaaacaacaagcaagaaaccgaaggaagacatcttttgatcaggattcagatgtggacatcttcccctcagacttccctactgagccaccttctctgccacgaaccggtcgggctaggaaagaagtaaaatattttgcagagtctgatgaagaagaagatgatgttgattttgcaatgtttaattaagtgcccaaagagcacaaacatttttcaacaaatatcttgtgttgtccttttgtcttctctgtctcagacttttgtacatctggcttattttaatgtgatgatgtaattgacggttttttattattgtggtaggccttttaacattttgttcttacacatacagttttatgctcttttttactcattgaaatgtcacgtactgtctgattggcttgtagaattgttatagactgccgtgcattagcacag

SEQ ID NO: 662 - DNA, 401 bp; single-stranded, linear
  immediate source library: TMLR3DT01
  immediate source clone: 401022
gaacatgctaatgaagagagaagatagcagttgcaaccagacaactgtcgtaaattttgtcctttcacagctgcagccattatctcattctttttccacagagtgagcgtcataatatttttctttccttacctcttataaaagtgcccatgagaatggaagttgtttttgttaattattaaattctgtataataaaagtacccatgctgttaaatttgcatgatgttttaaatattttaagatgaattatgccggtgcagctgtcgtgaaagtttacttgtgttttgctacttgcaaaggaaatgttcatgttctccctggcatagaacctatatttttaaagaaagataaatagaaattttaaggcctgaagtcaatattaaaaatatgagatatgaga

SEQ ID NO: 663 - DNA, 1020 bp; single-stranded, linear
  immediate source library: TMLR3DT01
  immediate source clone: 401043
cggctcgagcggctcgagcgccctcgccatggccgcgccggccccgggcctcatctcggtgttctcgagttcccaggagctgggtgcggcgctaacgcagctggtggcccagcgcgcagcatgctgcctggcaggggcccgcgcccgtttcgcgctcggcctgtcgggcgggagcctcgtctcgatgctagcccgcgagctacccgccgccgtcgcccctgccgggccagctagcttagcgcgctggacgctgggcttctgcgacgagcgccttcgtgccctttcgatcacgccgagagcacgtacggcctctaccggacgcatcttctctccagactgccgatcccagaaagccaggtgatcaccattaaccccgagctgcctgtggaggaggcggctgaggactacgccaagaagctgagacaggcattccaaggggactccatcccggttttcgacctgctgatcctgggggtgggccccgatggtcacacctgctcactcttcccagaccaccccctcctacaggagcgggagaagattgtggctcccatcagtgactccccgaagccaccgccacagcgtgtgaccctcacgctacctgtcctgaatgcagcacgaactgtcatctttgtggcaactggagaaggcaaggcagctgttctgaagcgcattttggaggaccaggaggaaaacccgctgcccgccgccctggtccagccccacaccgggaaactgtgctggttcttggacgaggcggccgcccgcctcctgaccgtgcccttcgagaagcattccactttgtagctggccagagggacgccgcagctgggaccaggcacgcggcccatggggctgggcccctgctggccgccactctccgggctctcctttcaaaaagccacgtcgtgctgctgctggaagcgnaacagcctccggccagcagccctacccggggctcaacacacaggctgtggctctggacatccggatattaaaaggagcgttgctggaagtctg

SEQ ID NO: 664 - DNA, 5304 bp; single-stranded, linear
  immediate source library: TMLR3DT01
  immediate source clone: 401587
aaggtgttgaagacactgaatgtggaatccaacttcatttctggagctgggattctgcgcctggtagaagccctcccatacaacacttctctggtggaaatgaaaattgacaaccagagccagcccctgggcaacaaagtggaaatggagattgtgagcatgttggaaaaaaacgcaacacttctcaaattcggctaccactttacccagcaaggaccccggcttcgggcatccaacgcaatgatgaacaacaatgaccttgtgaggaagaggaggcttgcggacctgactgggcccatcattcccaagtgccggagtggtgtctagtgtgtggcggtggagtccatgcctttgaactggatgtgttctattgatgacctgtgctctgcaggggaaaccagaaggcaaaatgctggcagcatgaaacccttttgtggttcagttctttatgcactaaggttttaggttgactagtggttgtagttgaaaattttataaaataccgttaatgtgaagtttttctttagtcacagaagttgaatctggttattatttaaaaactagaagcccccaaaccagcagatcttactgaagatgatgttccagcagcagcgacttagccccaggagcccagtttcaatggccttgctgtgtggtgtttcaagtgcatttaaaatgtgtgacacagaaacggcacactcttccacatgcttttgaagtattataaaacactttattacaaatttgtcttagctattagcaaataaaactgattatcattctttattaaccctccttggaattttgaaaacctcgattaaagttgccaaattgattactggatccagaacacaattttcccctcagaacagatagacagactgaagccactgaactctgccaggagtcaacatgagattccttttgctggatatgcagaaatgataggaaaaaaaccaatggtgaaatttcaagtttcaaaaaccaacctttcattaccaatcccaggcaacaaacatgtccctgagtgttctttaagaacatttgggatttatgtacaatttaatactggagttagaactttttccttattgaatgccaaccttatgatggatgtgaaaatctacggccaaatacttttgaaaacacctttctatattgcacagtgggcaaatggcttatgtgaggtaagacactagagggataaatttccagatcaacatggctatggtatttagtaatggcccagcttagagacttcagctactgatctcatcacttattagacaaattgctgctgaccttacgcctgtatattaagcctccgcaggatgccggacaatggtgaagaaactccagatatcaaggaattgggaaatcctggccaaaccaccccaagatgattacactgaaatgtagtattagtactgctgcaagatctctttttaacatcatgtgcgtctcttgggatccagcaaaagtgttaagccacaatgcccttgtgccttttaatataccacagtgccagttaaactaatatttttgtttgttgcttttgggagttattttcattagtgatttcagcaaatctcatgataaaggacaaggtcaagaactccagagcactgagcagagaggctggtgatgaaaaggtgaaggcctgcgcactgaactgtaaggcagtgggcagtacagggtaactggaggcggggccaggggcctcagcgctatggaagagtgtccactgaggctgcacatggcccaggagtggcaccatgttgcagggacaaccatccccatttggcttctccttaaaacacaattgcagctgcattctgcatcgctgaaaactgcaatataatattaaatctgttggtctatgcatggctgcgtatgtgtttcttggaacctgtgtgacagggacatgtgcctggcacactggccagaagactgggcagccaccatggcagtgctggatgacctcagtaagaatgtgtcatgtattccaggtgctgatctaaaaactgtgtctcaaatgtcaccgagcttatatgaagctcccagagagaacatttaaaagctcagagagtaaggttctagaaatggataaagattatacttttttcaaagtagaaacagagaacaaattctcttttatgacatgtccctttatattgaatgctgtcacaaagaatttgggattatattatgacaatagaattcgcatgtacagtgaacgaagaatcactgttctctacagcttagttcaaggacagcagttgaatccatatttgagactcaaagttagacgtgaccatatcatagatgatgcacttgtccggctagagatgatcgctatggaaaatcctgcagacttgaagaagcagttgtatgtggaatttgaaggagaacaaggagttgatgagggaggtgtttccaaagaattttttcagctggttgtggaggaaatcttcaatccagatattggtatgttcacatacgatgaatctacaaaattgttttggtttaatccatcttcttttgaaactgagggtcagtttactctgattggcatagtactgggtctggctatttacaataactgtatactggatgtacattttcccatggttgtctacaggaagctaatggggaaaaaaggaacttttcgtgacttgggagactctcacccagttctatatcagagtttaaaagatttattggagtatgaagggaatgtggaagatgacatgatgatcactttccagatatcacagacagatctttttggtaacccaatgatgtatgatctaaaggaaaatggtgataaaattccaattacaaatgaaaacaggaaggaatttgtcaatctttattctgactacattctcaataaatcagtagaaaaacagttcaaggcttttcggagaggttttcatatggtgaccaatgaatctcccttaaagtacttattcagaccagaagaaattgaattgcttatatgtggaagccggaatctagatttccaagcactagaagaaactacagaatatgacggtggctataccagggactctgttctgattagggagttctgggaaatcgttcattcatttacagatgaacagaaaagactcttcttgcagtttacaacgggcacagacagagcacctgtgggaggactaggaaaattaaagatgattatagccaaaaatggcccagacacagaaaggttacctacatctcatacttgctttaatgtgcttttacttccggaatactcaagcaaagaaaaacttaaagagagattgttgaaggccatcacgtatgccaaaggatttggcatgctgtaaaacaaaacaaaacaaaataaaacanaaaaaaggaagnnaaaaaaaaganaaantttaaaaaattttaaaaatataacgagggataaatttttggtggtgatagtgtcccagtacaaaaaggctgtaagatagtcaaccacagtagtcacctatgtctgtgcctcccttctttattggggacatgtgggctggaacagcagatttcagctacatatatgaacaaatccttnnnnnnnnnnnnnnnnnnnnnnnnncgtgaaagtgttacatattctttcacttgtatgtacagagaggtttttctgaatatttattttaagggttaaatcacttttgcttgtgtttattactgcttgaggttgagccttttgagtatttaaaaaatatataccaacagaactactctcccaaggaaaatattgccaccatttgtagaccacgtaaccttcaagtatgtgctacttttttgtccctgtatctaactcaaatcaggaactgtattttttttaatgatttgcttttgaaacttgaagtcttgaaaacagtgtgatgcaattactgctgttctagcccccaaagagttttctgtgcaaaatcttgagaatcaatcaataaagaaagatggaaggaagggagaaattggaatgttttaactgcagccctcagaactttagtaacagcacaacaaattaaaaacaaaaacaactcatgccacagtatgtcgtcttcatgtgtcttgcaatgaactgtttcagtagcccaatcctctttcttagtatatgaaaggacagggatttttgttcttgttgttctcgttgttgttttaagtttactggggaaagtgcatttggccaaatgaaatgggtagtcaagcctattgcaacaaagttaggaagtttgttgtttgtttattataaacaaaaagcatgtgaaagtgcacttaagatagagtttttattaattacttacttattacctagattttaaatagacaatccaaagtctccccttcgtgttgccatcatcttgttgaatcagccattttatcgaggcacgtgatcagtgttgcaacataatgaaaaagatggctactgtgccttgtgttacttaatcatacagtaagctgacctggaaatgaatgaaactattactcctaagaattacattgtatagccccacagattaaatttaattaattaattcaaaacatgttaaacgttactttcatgtactatggaaaagtacaagtaggtttacattactgatttccagaagtaagtagtttcccctttcctagtcttctgtgtatgtgatgttgttaatttcttttattgcattataaaataaaaggattatgtatttttaactaaggtgagacattgatatatccttttgctacaagctatagctaatgtgctgagcttgtgccttggnnnnnnnnnnnnnnnnnnnnnnnnnnnnntaactgattactgtagatcaacctgatgatttgtttgtttgaaattggcaggaaaaatgcagctttcaaatcattggggggagaaaaaggatgtctttcaggattattttaattaatttttttcataattgagacagaactgtttgttatgtaccataatgctaaataaaactgtggcacttttcaccataatttaatttagtggaaaaagaagacaatgctttccatattgtgataaggtaacatggggtttttctgggccagcctttagaacactgttagggtacatacgntaccttgatgaaagggaccttcgtgcaactgtagtcatcttaaaggcttctcatccactgtgcttcttaatgtgtaattaaagtgaggagaaattaaatactctgagggcgttttatataataaattcgtgaagaaatgtgtgctcttcagttctcaagttttattattatggtatttattaaagttctacaattg

SEQ ID NO: 665 - DNA, 253 bp; single-stranded, linear
  immediate source library: TMLR3DT01
  immediate source clone: 402766
aaacgatctgagtgtggtggggaatggagagagacgccccgtaaacagaaacaacatgggaaagcctccatttcccccagtagtggtgcacggcgcacagtaacaccaactcgaaagagaccttatgaatgcaaggtgtgcgggaaagcctttaattctcccaatttatttcaaatccatcaaagaactcacactggaaagaggtcctataaatgtagggaaatagtgagagccttcacagtttccagttttt

SEQ ID NO: 666 - DNA, 794 bp; single-stranded, linear
  immediate source library: EOSIHET02
  immediate source clone: 406422
attgccgttgggatgttcctcactncttnccagttcgtggctgaggcagaacccagactgaagagggaagagacattccagaggaggattgccttcgtcagggtaaggggtgggctgctcaggggccctacccttcacccccttctgtatcagattggccctcccactcccatctcactctgcgtgtacaatcttccatatccgcaagttcactggcactcttctggcacctgggcaagatcccagaacagaggatggagtgactggcctcacagagcttagtgcccgactcaggggaaatgggactggtgcatggggaaatggtcagcctaggataggacacgagagtctgaaattcaaagcaaccagcttgaagtggtttgagaagctggaagcaaacatgggctagagagatagggcagaagtcaagacgaggatctggactgatgtggagaaagtagccacggaagcatgaacctgtatcctgcacaaagtccctctttccggactcctaattcattatgcccaaaaggccttacgtgaaattccagcccagagtactcatgacttgagagacgtggacagagccagcttctaccttgcctggccgtctctcccctgtcttaatgtctgctcttgctctaagctccagaagagtggcgggccatgtatcttcaatatgtttttgctgtatgggcaggttgtcttattatgtgatcaacagatgtccaggaactaatgagtggaatttaatattattgtcaaataaaacttgatttgtcctataaaaaaaa

SEQ ID NO: 667 - DNA, 940 bp; single-stranded, linear
  immediate source library: EOSIHET02
  immediate source clone: 407527
agaattttatgcctacaaacaggttatattaaaagagaaagtaaaagaattgaatttacatgagctctgtgcagtgtgcctagaagacttcaagcctcgagatgagttggggatttgcccatgtaagcacgccttccacagaaagtgccttattaagtggctggaggttcgtaaagtgtgtcccctgtgcaacatgccagttctacagctggcccagttgcacagtaagcaggaccgtggaccccctcagggggccccttcctggggcagagaacattgtatagcttaccgcaaggattcagactgttgctggacacgacgtctgtgtggagccaggaggaacacatgtggtgtctgtatggctgctctctacctaggacaacagctgccacttcttttgcctcatgaagaactcttgggccagccaaactgggaacctaggtgtctgggtcttgtgacaaccaaagcactttgacactaccccctgccgagagaagaggagttgatgagcctgcgggtttgcctcaagaaacttcatgagggtctcttactaactccattacactctttctccctggagcctcatcttcccatgtcaagcaggagggtaaagaagggaactaagatcaaggtctttcaagccacacccccacctgcggatggatgggtttctctgtaggccatgcaggcctttgtcgcagcaaaccttcccagcagcccttgagccaagtaaaaccagcacaaccagccaccagtggttggtgaggcagtgcccacaaggctcatgttgtatgcctttgataaggccatcttggctttgagtagcagtgttccnagtcacccatntncccctnaggattacaacaactgntatcaaatcatctaagntgaaaacatgagatgcgcttggaaaggcctagtcagaagccattttctntta

SEQ ID NO: 668 - DNA, 2194 bp; single-stranded, linear
  immediate source library: EOSIHET02
  immediate source clone: 409041
actttatcccttcacctataacagcttgtattttcgtgtgcagttttatgattactcaaattgcacttgtagatatatcttaacaaacacttcatacaaaataagcataggattattttattcaccaaagtattgttaattagcagagctcaattctttggtgtcagtttatcaaatttaccttctaggttttgagtttattattaagaacctgcgtagacttattttattttttaatgcataggatcttttgccagaaatgagggcatactggcctgacgtaattcactcgtttcccaatcgcagccgcttctggaagcatgagtgggaaaagcatgggacctgcgccgcccaggtggatgcgctcaactcccagaagaagtactttggcagaagcctggaactctacagggagctggacctcaacagtgtgcttctaaaattggggataaaaccatccatcaattactaccaagttgcagattttaaagatgcccttgccagagtatatggagtgataccccaaatccagtggctttcaccaagccagggttgagggagtacagacaattnggtcaagttggaacngtggcctcanttaggaaggacccagcagctncaaaactttnaccgggtccggtgcaggcccgcatggctcctgggctgggagcaacgcgactgaccgtggtcgtgggcggacggcggctgcagcgtggaggagctggggtcgctgtgggtcgcgaacagagcccgggacgtgcgcgcttggtgcacgatcctgaaggggagctccgaggggcccgggtctccagggctgctgcggccattcccggagcccggcgcggggcccgcgagatactggtttaggccgtcccagggctccgggcgcacccggtggccgctgctgcagcggagggagcgcggcggcgcgggggctcggagacagcgtttctcccggaagtcttcctcgggcagcaggtgggaagtgggagccggagcggcagctggcagcgttctctccgcaggtcggcaccatgcgccctgcagccctgcgcggggccctgctgggctgcctctgcctgggngttgctttgcctgggcggtgcggacaagcgcctgcgtgacaaccatgagtggaaaaaactaattatggttcagcactggcctgagaacagtatgcgagaaaattcaaaacgactgtagagaccctccggattactggacaatacatggactatggcccgataaaagtgaaggatgtaatagatcgtggcccttcaatttagaagagattaaggatcttttgccagaaatgagggcatactggcctgacgtaattcactcgtttcccaatcgcagccgcttctggaagcatgagtgggaaaagcatgggacctgcgccgcccaggtggatgcgctcaactcccagaagaagtactttggcagaagcctggaactctacagggagctggaccttaacagtgtgcttctaaaattggggataaaaccatccatcaattactacccaagttgcagattttaaagatgcccttgccagagtatatggagtgatacccaaaatccagtgccttccaccaagccaggatgaggaagtacagacaatttggtcagatagaactgtgcctcactaagcaagaccagcagctgcaaaactgcaccgagccgggggagcagccgtcccccaagcaggaaagtctggctggcaaatggggccgccgagagctggggtctgagagtctgtgaagatggcccagtcttctatcccccacctaaaaagaccacgcattgatgcccaagttttggaaatattctgttttaaaaagcaagagaaattcacaaactgcagctttctaaaaaacaactccaaagtgaagtctgtttattttgctgtttcccctccatgcctgtgaattggatgttgtggtccctgtagagtgagtgcatgtggcgtacacggggagaaaggagctctaccacgcctgagtggctgttttgagcttgggataaagctcacagattgtttttttnttttctctattaaactcttcagtgcccnggtagatcaggcaggnatacttnggatttagacaggtggcaccggttcagggggactccnctngncngagnttttccccctnggagccngcttgcctnctttggggaagggnccctg

SEQ ID NO: 669 - DNA, 1658 bp; single-stranded, linear
  immediate source library: BRSTNOT01
  immediate source clone: 413341
cggctcgaggtttcctttaatccttcagataaggaaataatgacatttcaacttaaaaccttacttaaagtacaggtataaaataagacaaatgtttaaatttagttatgttcacggatagttgtcaattggtctgaaacaaattcgctagggaatctatttgtgtagaactaattaatgtaaaaaaaacagaccatctcgtgttgtgtgcactgtgatataatggtagtatcagtgcaacttaaactaatgattgtacttgatattaagtgttctcaactgagtaacttttaagtggaaaccaagtttagatttggggagtggtaaaggaatcagctttttctattgttaggggaagacagtaatttatcattcatggaccagtagattgttgaaagttggtgaatcggattataagcttctagctaacacaaggattcagaattaggtaaacatctgaaggtttagtatattagaaacacccaaaccagtaatatgctaacctgatgcactgctgaaagaaaatgtgaatttttcgtaataattgcattttagtgaattgtacagtgggtggaaagggcatttggagctcattagaatgagacatagtacaccccaatggccctgtttattaaatgtagtggattaagtgtctgtcaacaaatacaccaaaaccattttttatagaaacagtatttaatggtcactcaatagctttcaaaatacatttttgtattacagcactgcacaagctattctaatagtgctctggcctcatcattcctgcaaagcttgctttggggagttggataatgtgaaaattttaagtacctaggggagaaagagccatgtaaatatctgtaataaacttgtagcatatgtaaagttttcttggcctttatcttacaaaaatggagtattttagtatgaatttgctgaatgtaagaccgtggactgttttttataatatggcctaattttaaaggtccaaaataacttgtttttaaagtttgcccttgtgctaaagtgccagtgtatgtatgttatacttgatttggttgtaaactatatttcaaagtaaaccctagtgtaataagttttataactaaaaaggtttaagctgctaaaactatttttaaggggatgtgaaatgcagtatggggctatctttttttcctcctctaagcccaaagattaactaggagtccctccaaccttatagattgttggctttcacaatcttataacctaggatacaggtagtttcgagtatggtgcccagtgatgttttgtttttgtttggtcaaggggtaggtgcaacccaatggaccacttatgcaaaagatgtaaactcttgcataatacattgataacatgttttgccaactttaaatgcttaaacataagcgaaaccagtagcaagtatgtgggtcagcttaaaaattttgattgttaatgccctattttctaatttggcacctcttgatgcctaagcaggtaagcagatgcctaagctgtatttctccaaataaatcaagatgaagtactgcccaagttaaatattgatagcctaaagacaagtttatgtagtacttaatgtacatgatatgaagcataaaattaaataaaatttttccccattggcttggttttatttt

SEQ ID NO: 670 - DNA, 1396 bp; single-stranded, linear
  immediate source library: BRSTNOT01
  immediate source clone: 415659
cagggactggcttctcaccaccagcctttccgtctgatggacagcagaccccgcctccagcaccaagcagtgtccctacactcaattcactgtgtgagctggagtggcaggcagggatgctgcttctgttccctccaggccttggtcttcatggtaaccaccgcgtctgtggccgtagagggaaacagccactgtgacaacccagagacctggggtcagccttaagtaggaagaaattgcagtgtctatcctgctgccatcagcccttcctgctccagctacagttgggccagctgtggccttagtggatggtctgggtggatggctctgtcaatgtcaggcccgagaacagcctgcggaatgacagcctggggtccttgtgccacctggtggacgggaaaggcagggcggctgcagtttcagaggccagagcctgggcctcctgtcatctgctgacttcacagaaggcccaggctacaaaccccacagtttatccaaggaaaatctagttaaaataatccaatggacagaagccccaggaaggggtatttccaacacttggcgtctcaatgaggataaaagggagggactgtaggttgtccagcataaggagccccagagttctttcaccagcagacagattctccatgtgttttcccactgttaaggactctgtccaaagaacctcagcatcagctccctcaagcttaatgatccaggctgcagaagaaagttgtcactccagtgagttacccagggctccagggagcccacagcagcatcagacccatccaggggctacagggcctgcccccctgcaggtagaaacacagtatacccgtttgtcatctggtttggcaggacccagggccctcagcaatgagtctgagtgttcaaagcccactttagaacctaaagcattttgggttaataaagcaaaattttgcttatgttatttggtggtgtcaccgcagcttataccaagacaccatggctcagacatggggatcaggacacacctttgagatcccactgttagcaagaaaaggctgtccaaggcaggcagtgtggtagttgtctgattttgtttaccacacgccaggtcccagggaagtcttgcacagactcttagcagacaagcagggaaaagagagggtcctggtgggtggaaggattgggaaggggattctgggcctggaagcctgctccttcccctctcagcagtctcaggactactgttggattgcaaacagcatctctgacccagtcttcggactcattctgtaaatggaggagctgaggtcagaggggggctgtgaactactcaagaccacatgcttgcagtcctacaggcttcccgacccacaggccagctacggattttgcacttttgctc

SEQ ID NO: 671 - DNA, 364 bp; single-stranded, linear
  immediate source library: BLADNOT01
  immediate source clone: 427571
ggagggagtatgtgggagcaggccaaggcccttcaggagggggcagagattgttgtgtgtaccccaggtcgactgatagatcatgtgaaaaagaaagctaccaatcttcaaagagtctcttaccttgtgtttgatgaagcagatcgaatgtttgacatgggatttgagtaccaagttcgatccatagcaagtcatgttcgtcctgacaggcagactctcttatttagtgcaacttttcgaaagaagattgaaaagttggccagagacatcctgatcgaccctattcgagtggtgcagggagatattggagaggcaaatgaagatgtgacacagattgtggagattctcccatctggacctagta

SEQ ID NO: 672 - DNA, 667 bp; single-stranded, linear
  immediate source library: THYRNOT01
  immediate source clone: 437714
ggcaaaccttaaactagacccaggcctcccgagtccagtacccttttcattatactgttggtaagactgtgactttaggcactgaatggcataatgaaatcacacagttttgcatgccttatagaaggagggcactctgaacattgtcagttgagtaataactgcctatattttcagggacgtaacaaatcctggaagagccgcacttaccacttgtagatttccatggttatatttctccatacatgctgtcanttaaatgttgtttttcttctcttctcaaagatcttcagtttagaacttggaggcatatcaactgtggttctaaatggctatgatgtagtaaaggaatgccttgttcatcaaagcgaaatttttgcagacagaccatgccttcctttattcatgaaggtgacaaaaatgggaggcttactcaattccagatatggccncaggatgggttgatcacagncggttagntgtaaacagttttngntattttggntatngccnaaagncttttgaatctaaaatcttngaaggaaccnaatttttcaatgatgctattnaaacatncaaaggtaggccntttgactttaaacagttaatnacggatgctntttnaaacataacccatctnatcnnttttngnggacggttnanttat

SEQ ID NO: 673 - DNA, 417 bp; single-stranded, linear
  immediate source library: MPHGNOT03
  immediate source clone: 440958
aattctttaaataaaaaatgtcttcctctttctgaaatcactactgcagtctcacaactaccctggttgttaatgatctcttctcttgaaatagtaaataccttgaggaattccagcttggtaatagattctagttttggctcttcttaactatacatgtaggatttcacttttattatttgtggtgcctttaaaagaggagcagctgtgcttttgtcagagaaacatttaatccagcacatattgatgaggataccaaaatgggtaccagttgttttaattccatctggatttgnggataatattatganaacttttcatcttgttcttaagagtgccattctanatccttcatccctttcttcacctctttcttcaaaatttgctggtctcctctccaagaaaataaggaataaa

SEQ ID NO: 674 - DNA, 1071 bp; single-stranded, linear
  immediate source library: MPHGNOT03
  immediate source clone: 441128
ccgtgaataagacttacaacagcaacctcttcttctggttcttcccagctcagatacagccagaagatgccccagtagttctctggctacagggtgggccgggaggttcatccatgtttggactctttgtggaacatgggccttatgttgtcacaagtaacatgaccttgcgtgacagagacttcccctggaccacaacgctctccatgctttacattgacaaatccagtgggcacaggcttcagttttactgatgatacccacggatatgcagtcaatgaggacgatgtagcacgggatttatacagtgcactaattcagtttttccagatatttcctggaatataaaaataatggacttttatgtcactggggagtcttatgcagggaaatatgtgccagccattgcacacctcatccattccctcaaccctgtgagagaggtgaagatcaacctgaacggaattgctattggagatggatattctgatcccgaatcaattatagggggctatgcagaattcctgtaccaaattggcttgttggatgagaagcaaaaaaagtacttccagaagcagtgccatgaatgcatagaacacatcaggaagcagaactggtttgaggcctttgaaatactggataaactactagatggcgacttaacaagtgatccttcttacttccagaatgttacaggatgtagtaattactataactttttgcggtgcacggaacctgaggatcagctttactatgtgaaatttttgtcactcccagaggtgagacaagccatccacgtggggaatcagacttttaatgatgggaactatagttgaaaagtacttgcgagaagatacagtacagtcagttaagccatggttaactgaaatcatgaataattataaggttctgatctacaatggccactgggcatcatcgtggcagctgccntgacagagnntccttgatgggnatggcctgnaagggtcccgggnttcaaganggagnanaaaaangttggaggtccttnaaactncagttaagtgnttgtcatcggaagttggnacttca

SEQ ID NO: 675 - DNA, 281 bp; single-stranded, linear
  immediate source library: MPHGNOT03
  immediate source clone: 441141
attggcaattccttaggtaattgtaaagacctaaaagtaaacaagcaaaagaacattgatcagccaaaatgttatagttttcatgtcacaaaaaagaactgtatataagccattgattttaagtggaattaatgaaaattctacaaagtactacagaaaaattacatagtcatattgctgaataagaatgtattgccacaataaatgcaatattttttagaagtcagtaatcttttacagtagtttccacactttgtatctagtttttaattcatcaattt

SEQ ID NO: 676 - DNA, 383 bp; single-stranded, linear
  immediate source library: MPHGNOT03
  immediate source clone: 441180
attctcaattttccctggttagttaccatagttacatgagccctttataacatcaagagggggaactaggtcacagttttgaaggagtttgaattatgcaattatgttttctaaaagcaggggaaagggtttttaatttagagaagagagatttatactctgttcaaaattgaaattttggtctaattttgctggcaaagcctaaaaatttgtccaaaatttaatagttgatatagtacatataaattattcaacctatacaaataacataatagctagatccntaaaaatgacatatnctgtctttatagntatccctttncncaatgagctgttatnccaaaatggttttgcaggnaatcagggaaccccacaatgcctgg

SEQ ID NO: 677 - DNA, 651 bp; single-stranded, linear
  immediate source library: MPHGNOT03
  immediate source clone: 441337
attctgagagagaaatatagatgctaggcatacacctagaaatagcattgacagtagcctttccagtaaatatatgactcagggaaaagcctcagcgaagaggacccagcaggaatcatgagggaaggaaaatgcagcactctaaatggccactcaggcgttcctattcactcgggaaaattaggttcatttcacaggacacagcagtgttagatcaggcttcaacttaacatttaaggggaaatgtcagatttttttttaatttaatgaaattgttaatgaggaaaatttttaatatagtcttatctaccncacatccccatagatttaaggattttaatagaaagtcatgatgtatgtatttaagccacgttaaaagaaaaaatataactatggaccggtattcagtgaatacagtttcatggtttttaattctttcaaagcacattaaaaatggtgtgctgataaaccccaagtaaattaaccctttttccgtataaatccattttttgttttgaagaggggaaattatatttattgttgtttactgaatcctggtgtgaaagcatatcagatatgtatgaactgctactgctgtacttccgatttacggacatcattttattgctatttgtagacgtgataacatga

SEQ ID NO: 678 - DNA, 2185 bp; single-stranded, linear
  immediate source library: MPHGNOT03
  immediate source clone: 441539
agagtggcatgtatgcatgtgacttatgtgacaagacnttccagaaaagcagttcccttctgcgacataaatacgancacacaggaaaaagaccacatcagtgtcagatttgtaagaaagcgtttaaacacaagcaccaccttatcgagcactcaaggcttcactcgggcgagaagccctatcagtgtgataaatgtggaaagcgcttctcacactcgggctcgtactcgcagcacatgaatcacaggtattcctactgcaagcgggaggcggaggagcgggaagcggcggagcgcgaggcgcgcgttgaaagggcacttggaacccaccgagctgctgatgaaccgggcttacttgcagagcattacccctcaggggtactctgactcggaggagagggagagtatgccgagggatggcgagagcgagaaggagcacgagaaagaaggcgaggatggctacgggaagctgggcagacaggatggcgacgaggagttcgaggaggaagaggaagaaagtgaaaataaaagtatggatacggatcccgaaacgatacgagatgaagaagagactggagatcactccatggacgatagttcggaggatgggaaaatggaaaccaaatcagaccacgaggaagacaatatggaagatggcatgtaataaactactgcattttaagcttcctatttttttttccagtagtattgttacctgcttgaaaacactgctgtgttaagctgttcatgcacgtgccctgacggttccagggagctttagagagggacagaaggggcggttcagccaagacagatgtagacggagtttggagctgggtattgttaaaaaactgcattatgcaaaaattttgtacagtgttaaggcctaaaaactgtgtggttcagagactaattcctgtgtttaatagcatttatactttaagcacaactagaaaattgtaagaattgcactctacttatgtatcactacaaactttaaaaaactatgtctcaatttatattaatacattttaaaaaggtgcccggcactaccatacatcagtatttttattatnattattnttattcctntttaatttaatgtgctcgcactacaatgcatcagtattatgattcctctgtactttcctttcgctattcatcaatttcccattttttttttcagcttaagtaaccacacaattttaggcctcaatttttttttttttctgtgaaggaacttgaagtgatgcatgtgtgaatttaagataccgaagtcttaaagtgacctggacgtgaaggaaaaagtaagatgagaaataaagaaagcctttgtaaggtggttttaaaagccttatatgcaaaccttttaatctgtgtttctgcaagtgccatccttgtacagtgttaagagggtaacatgggttacctttgcaccagcttcagtgttaagctcaccctgttctttgaagcacccatgtcagtattagaagaataggcagcagttccttagtttacatatgtttgtgcaattattttctgtacttttttgttcattaattttgtcagtattacaccaaactgtttttgcnnnnnnnnnnnnnnnnnngcattcatttaattttaggtcaaataacattttatttatgtggctcattttatatttcctaattttatttatttcatactgtagtgtacagtattatagttcttcaatatatagatatattttagtaaaaaaggaacatgacgttgatcatttgggcaaattttacgtaaagagaagagcatttattgtgttttggaacattaattgtgagatgggatttttcaattttattattttatttttgttttttttccaattactggaaattccaaatttgggaacttttgatacgatcttgtgaaaacactgtattttcgactgaaaattccactttcttcatcttgttttttagctaaaaagagggactgttaaatacaatgtatgataccatgacaaaaatctttcctgaattgtctttgtaaaagtattattgaattttcaatttgtaatttcttttgaaaatgaccatgctcgaataaaaatgtagccaaactaagaatgtagttaatgagttctgtacttttagagagttttccttcaatggacccataacatgtaacatgctttatgcttaata

SEQ ID NO: 679 - DNA, 1520 bp; single-stranded, linear
  immediate source library: MPHGNOT03
  immediate source clone: 441541
catttacttggagtataatttctttgaaacgactatcaagtttgccccagcaaacctaggctatgcgagaggcgtagatcccccaccatgtgacgctgggacagaccaggactccaggtggaggttgcagtatgatgtctatcagtattttctgcctgagaatgacctcactgaggaggatgttgctgaagcatctgcagaggatggtcagtgtgccccaggtgaaggccagtgctctcaaggtggttaccctaacagctaatgataagacaagtgtttccttctcctccctcccgggacaaggtgtcatatacaatgtcattgtttgggacccgtttctaaatacatctgctgcctacattcctgctcacacatacgcttgcagctttgaggcaggagagggtagttgtgcttccctaggaagagtgtcttccaaagtgttcttcactctttttgccctgcttggtttcttcatttgtttctttggacacagattctggaaaacagaattattcttcataggctttatcatcatgggattcttcttttatatactgattacaagactgacacctatcaagtatgatgtgaatctgattctgacagctgtcactggaagcgtcggtggaatgttcttggtagctgtgtggtggcgatttggaatcctctcgatctgcatgctctgtgttggactagtgctggggttcctcatctcgtcagtgactttctttactccactgggaaacctaaagatttttcatgatgatggtgtattctgggtcactttctcttgcatagctatcctcattccagtagttttcatgggctgcctaagaatactgaacatactgacttgtggagtcattggctcctattcggtggttttagccattgacagttactggtccacaagcctttcctacatcactttgaacgtactcaagagagcgctcaacaaggatttccacagagctttcacaaatgtgccttttcaaactaatgacttcattatcctgggcagtatggggcatgctggctgtaagtggaattacgttacagattcgaagagagagaggacgaccgttcttccctccccacccatacaagttatggaagcaagagagagagcgccgagtgacaaacattctggaccctagctaccacattcctccattgagagagaggctctatggccgattaacccagattaaagggctcttccagaaggagcagccagctggagagagaacgcctttgcttctgtagatgcccaggggcttggtcagtgtgcctcagctttggagttcatgcctggagtggttcaacagtctctggtgcaagtctaataagagatcaggcatatatatctgttctttgcataatattatggtgcccttattgatatatggtaagggtgtactaggggattaggatgattgtaagagaatgagaaagangaccaaaaggttggtggnagggaggctttttcttatttccaaatattgaganattaccttttg

SEQ ID NO: 680 - DNA, 261 bp; single-stranded, linear
  immediate source library: MPHGNOT03
  immediate source clone: 441865
attcggaagtagtgctggagatccggatacttgagttggaattggccaaaatctttgcctagacttttaaacaattactactttgcaaactgagctgtggcatatttagggctaatcagatcttggaaatgattgtttttagcaggaatcatctggtttacaccgcgtcagactgccgcccgcaatctccgtcatcaaagcaggcaaccctgtagaggatgcctttccctgggaatgatccggaatggacgacacctgagc

SEQ ID NO: 681 - DNA, 1154 bp; single-stranded, linear
  immediate source library: MPHGNOT03
  immediate source clone: 443093
cccagaactagaccacaaccttctgtgactgctgctttcccactaccccagattgtttaggggagaagctggggtgacttgtacccctttgccagattgtttgaagcaggggaagggaggtggagtgtatttccttgcccaggcctggcacaggcagccaggaggaccagcctcacttaaggataaagacctatgctgagaagagctcctgtgagtgacgctggcactggcttcccgcctcactctacttccccagaccaggtgttcggctgccagttggaatcactctgccagcgggaaggagacacggtgcccagctttttgcggctctgcattgctgctgtggataaaagaggtctagatgtggatggcatttatcgggtgagcgggaacttggcagtggtccagaagcttcgctttctggtggacagagagcgtgcggtcacctccgatgggaggtatgtgttcccagaacagccaggacaagaaggtcggttagatttggacagtactgagtgggatgacattcatgtggtcaccggagccctgaagctttttctccgggagctgccccagcctctggtgccaccactgctgctgccccatttccgtgctgcccttgcactctccgaatcagagcagtgcctctctcagatacaagaattaataggctcaatgccaaagcccaaccatgacactctacggtacctcctggagcatttatgcagggtgatagcacactcagataagaatcgcatgacaccccacaacctgggaattgtgtttggaccaaccctgtttcggccagagcaggagacatctgacccagcagcccatgctctctacccaggggcagctggtccagctgatgctcaccaacttcaccagcctcttcccctgatgcagggaaggaagaagagaaaacatatttccggtcatctctggtggtgagaggctggtgttctgttttgaggatatccctttaaatctcccaaatgactgtctctatcttcatgagtgtgacttgaggtgttgggatgggtgagggagcttctctaaagaggaaagtgagtggattaacccctgcttctcttcttgttccctgttatcattcctccccaacataataatacataaagtggcatggtattttt

SEQ ID NO: 682 - DNA, 907 bp; single-stranded, linear
  immediate source library: MPHGNOT03
  immediate source clone: 443710
cagccccaacccaagcctcagccccagcagctccacccgtatccgcatcgacatccacatccacactctcatcctcactcgcacccacaccctcacccgcacccgcatccgcaccaaataccgcacccacacccacagccgcactcgcagccgcacgggcaccggcttctccgcagcacctccaactctgcctgaaaggggcagctcccgggcaagacaaggttttgaggacttgaggaagtgggacgagcacatttctattgtcttcacttggatcaaaagcaaaacagtctctccgccccgcaccagatcaagtagtttggacatcaccctactgaaaacttgcgattcttcttagttttctgcatacttttcatcacgatgcaggaaacgatttcgagtcaagaagacttttatttatgaacctttgaaaggatcgtcttgtatggtgaattttctaggagcgatgatgtactgtaattttattttaatgtattttgatttatgattatttattagtttttttttaaatgcttgttctaagacatttctgaatgtagaccattttccaaaaaggaaactttattttcaaaaacctaatccgtagtaattcctaatcttggagaataaaaaagggcggtggaggggaaaacattaagaatttattcattatttctcgagtactttcagaaagtctgacactttcattgttgtgccagctggttgaaattaaaactctgatattactttttttgagganttttaatnttgnttttgnntaaacatatagtttgtctagaagtttaaaaagctaaaagttaaaaatggngnaattatgnaaatnnnacncnncaggtnngttccnaaanggaatcagtagttaaggataccctgatttcaaaatatt

SEQ ID NO: 683 - DNA, 1100 bp; single-stranded, linear
  immediate source library: MPHGNOT03
  immediate source clone: 444827
ctagagagatgatttctgaaccgcaattttgagcccattagaaggtgtgtggtgggcatttatttccatcctgatgctctggtgagaatctttgcagacgcactagatccagaagctgttaatcttggtgcatttattttcctacctaaaagaaccaagcagctcagaggcagtgactgtacaggatgcagtgtttataataatgctgagcttgctggtctggaaccccacactttagcaatcccagcattgttcctgtttatgaagttgacaaagtgaccagggcaagggggtattatcattaaatacactctaggagaggcagaacacatgagggcaatgtttttcagaggtctttaggccaccgcatcagattctcctggagcataaagcaaatgctttatgagtccagggcccctgcagacctactgtatactagtatacagctccctcttagtggatctcaagcttgtttccaaaaagtcattacactccttaccaaagcccatgacacattcatacagattcatccagacataacccactgcatggtccagtgcatgcttgtgtgcttaacttattatagatcaagtgttatttaagtccaacatattaaacgtgactgaaatattatatgcactaaatcggaagacaaatggccgtgctggatactctcccatttgcacttacaggccacgccatgctccatcctccccatcctgcctggggaacctgaccaatgtggctaaaccagcaggctccctggctgccagcttctggctggttgagccaatgggaagcatgagaggagagccgagggtggggagacagtcagatcagggtttctgtcctcagggctccctccctggcaggtggtggcaggagtggctgcattcccctctgaaggctccttcaagcctctcagcaaacagctcccatctccaagtccagccacctgttccatcctctcctctgtaggcccagcagtgggaatgacccaccactattgccagcctcagcatactgaagcaccccttactggattccctaaattctatgcacatgtttattaaatgctcctcaattacccagaaaaaaaa

SEQ ID NO: 684 - DNA, 1060 bp; single-stranded, linear
  immediate source library: MPHGNOT03
  immediate source clone: 445186
tgaaaactatgaacctggacaaaaatcaagggccagtatcaagcacgatatatatagctatgcagttatcacatgggaagtgttatccagaaaacagccttttgaagatgtcaccaatcctttgcagataatgtatagtgtgtcacaaggacatcgacctgttattaatgaagaaagtttgccatatgatatacctcaccgagcacgtatgatctctctaatagaaagtggatgggcacaaaatccagatgaaagaccatctttcttaaaatgtttaatagaacttgaaccagttttgagaacatttgaagagataacttttcttgaagctgttattcagctaaagaaaacaaagttacagagtgtttcaagtgccattcacctatgtgacaagaagaaaatggaattatctctgaacatacctgtaaatcatggtccacaagaggaatcatgtggatcctctcagctccatgaaaataggtggttctcctgaaacttcaaggtccctgccagctcctcaagacaatgattttttatctagaaaagctcaagactgttattttatgaagctgcatcactgtcctggaaatcacagttgggatagcaccatttctggatctcaaagggctgcattctgtgatcacaagaccactccatgctcttcagcaataataaatccactctcaactgcaggaaactcagaacgtctgcagcctggtatagcccagcagtggatccagagcaaaagggaagacattgtgaaccaaatgacagaagcctgccttaaccagtcgctagatgcccttctgtccagggacttgatcatgaaagaggactatgaacttgttagtaccaagcctacaaggacctcaaaagtcagacaattactagacactactgacatccaaggagaagaatttgccaaagttatagtacaaaaattgaaagataacaaacaaatgggtcttcagccttacccggaaatacttgtggtttctagatcaccatctttaaatttacttcaaaataaaagcatgtaagtgactgtttttcaagaaga

SEQ ID NO: 685 - DNA, 2038 bp; single-stranded, linear
  immediate source library: TLYMNOT02
  immediate source clone: 447212
ggtctttagtcctctggcataatttagacatgttttggaagagcatgagttccatatctgagatgagatttaagactttcagtgcagatagtacaagccatttcttcagggttcctctgggggcagctccttcatgaggtcccacctccggggaggggcacagggctccagatagtaagcacttaaggcaaacagtgggtggcaccaacttttaaaggtgactctattaatggcttcacctctaaattatatttttacagatatgcacctatgcaacttaacgtggctcttctaagcaggtgaggacttcctcctcaatgctctctataaaaattatttgtgttctatatagtgagttttaccagtaaatgtggcttaatattttaattcttagaatgtgtcttctctacgtgatgtgactaaattctgttttgtttgtggaatgactagcacaggccgactccctctctccctccattaacaaaagaccatgantgtaatcgantgtatcncatgtatactgctaatgcctgattcatagatgtggagatacttttgaagaacaaactattccttacccatttttgtagctcaaaaataatttttcaagttcatgaccttattaaaatgaacttgtgtttttttaacaaacgtgtatgttttattttgatagtttctttccgtaagataattgaaatattatactgtaaacccttttcttttctttttttgaaaagtccaagaatgtacttatacaggcatttttccccacctatttttggccattctcataccacagactaaagagtgaaatgatttgtccattgtagcttattgtttatcagtagttcttttgtcagctgcttacattttttctttcatggttttgtgaatcattttcagtatgtaatttataggaaccttgtcctctggttatagtagactgtgtgccctcctccagtgatggcattattagacatgctggtcatttaccctcagaaagactctcttattagaatggtgagtgcttcagttatagtatgtttgaatttttaaaaaattctgttttagaaatgtatcttatgctctcatgactatgcagtttctaaacatacacatagaagctgagtctctgatccaatatgtttttatttgttccatttaatttatcacatagattgggaaggcaagctaaaagccttaaaaatgccctttatattttgagtgatttcagcgttgaacactagtatactatctaaatttgctgctcactttctttaaactgtggcaattaaaggcatgtttatacatgacttaatcgtgaaatgtttttcactcttactgcacagacttgacggcaatcataactggttagtttttttgttttgttttgttttattgtttttaatgaaactggtaccatctgtgcttgcacaaaaaacttccattgccatttttgagaactaacctaactagtcatgctaaccagaaaatccactggggaggaggttccttttgaaacaaaatgctgttcagttagtaaccaagttactttgattgcaaaagcagctgtgtttctgataagtactgaacaaatgtgtgtaattttctgtgccagacttatgactttgttttcaagcactgtaatgtgggatggatggttagaaacaataatatattagggtttctgtttaaccctttcaggactgaactgtatctccttttgttaattttcccctgtgttgtgataaatgtttgccagcattcagtactgtgttggtccagatgtaggtttatatgctcatttttagcttatttcttgtaccttgcagcatgctctacgcattcagtccttaaggggtttattttacaaactgtgcgcctgtaaggtttattagcaataagatagaaaattgagcaagtttataccataattttgtagaaaaaaagaatctgctcagttccatatttcatccgtgaaaaacttgcaatacgagcagtttcaaggaataaataaaaaggaaatgtaaaccattga

SEQ ID NO: 686 - DNA, 234 bp; single-stranded, linear
  immediate source library: TLYMNOT02
  immediate source clone: 447323
cangaggttccaagtttctgaaagggagttcgtgcctttttcctgctctaagagaattaagagaggtgaatagaattgagccagntgncttaaatattatgtattttctaatctctgagtagtagactngagtgatcgctgggtcantctgttcanttcggttgaagacacagccagttcttgatcaatcagaatacccagntttgtaacacggtagtcagctgcctgcatttc

SEQ ID NO: 687 - DNA, 280 bp; single-stranded, linear
  immediate source library: TLYMNOT02
  immediate source clone: 447687
tttgactccacggaggacatctttcacccagttttgggaaatctgaggaatggattcttctacagactgataaaatatcacaaggtccaagagtttgtgtgagaaagaggacatcaaggtaaaattttttaagtggataaagatggagaagtagaaggatgttattcaaaagtgtagtttatggattaaggttggtcgtgacaatcagaagcctttaattatcaggcccacccatccggattcattaagcagattgtgtcttatcttgcatttctgtttc

SEQ ID NO: 688 - DNA, 231 bp; single-stranded, linear
  immediate source library: TLYMNOT02
  immediate source clone: 448520
gagaaaagttgaaatcacatcactgaaaataatacgaattgggtagtagccctagttagctcatgctgatcagaaaccgatgggcgattgttgtcattccaaaaatggatgaggaaattcttaccaacttcagagttctagtctgggaatgactgtcttagggtctgttgatgggaaagtaagnaaagcagtcacaggttattaggagncttgggacacattgacttcgta

SEQ ID NO: 689 - DNA, 1429 bp; single-stranded, linear
  immediate source library: TLYMNOT02
  immediate source clone: 450088
cggctcgaggggaaggcctttagtcgtggctatcaacttagtcaacatcagaaaatccatactggtgagaaaccttatgaatgtaaagaatgtaagaaggccttccgttgggncaatcagcttactcaacatcaaaaaattcatactggggagaagccctacgaatgtaaagactgtggggaaaggcttttcgatggggctcaagcctcgttattcataagaggattcatactggtgaaaaaccctatgaatgtaaagactgtggaaaggcctttcggcgtggtgatgagctcactcagcaccagagnttccacactggggaaaaagnntacgaatgcaaagactgtgggaagacctttagccgtgtgtataaacttattcagcacaagagaattcatagtggggagaagccttacgagtgtaaagactgtgggaaggcttttatttgtggttcaagcctcattcagcataaaagaattcacacaggtgagaaaccctatgaatgtcaagaatgtgggaaggcctttactcgagtcaattaccttactcagcatcagaagatccacaccggtgagaagcctcacgaatgtaaggagtgtgggaaggcctttcgctggggttcgagcctcgttaagcacgagaggatacatacgggcgagaagccgtacaagtgcacagaatgtgggaaggccttcaattgtggctatcacctcactcagcacgagagaatccacacaggcgaaaccccgtataaatgtaaggagtgtgggaaggctttcatttatggatcgagcctcgtgaaacatgagagaattcataccggggtgaaaccctatgggtgtacagaatgtgggaagagctttagtcacggccatcagcttacacaacatcagaaaacgcacagtggggcgaaatcctacgaatgtaaggagtgcgggaaggcatgtaaccacctaaaccatctccgagaacatcagaggatccacaacagttgaagagccttttgaacgcagtagcccgctcgtatctatggtttcgctttccacagtttgttacctgcagtcaactgcagttcaaaaatattaaatggaaaattccagaaataaagaattttaagtctcaaatggtgtgcccttctgagtagcgtgatgaaatctctcgctgtccggctccagccggccggggatgtgagtcatcccttggtccagcacatccacgctgtatacgccacccaccctgctagtgacttagtagccgtcttggtgatcagatcaactatcccagcatcacagtgcctgtgcccaagcagtcctcactttgcttaacagtggccccagagagcaggagtagtgatgctggtgattcggatatgccaaagagaagccacaaagtgcttccttttaaatgaaaaggtgaaagtnctcaactt

SEQ ID NO: 690 - DNA, 238 bp; single-stranded, linear
  immediate source library: TLYMNOT02
  immediate source clone: 451538
aggacttcgagctgattcagcgcatcggcagcggcacctacggcgacgtntacaaggcacggaatgttaacactggtgaattagcagcaattaaagtaataaaattggaaccaggtaaattgtttgaaattcatttttcttactgctagaaagccctgggntatcttaaggcttattttaatgatgtttngttaanattctcttgtttttccccacatctgggntaaatagagctgct

SEQ ID NO: 691 - DNA, 412 bp; single-stranded, linear
  immediate source library: MMLR1DT01
  immediate source clone: 469895
aagacaaagaatactataaagtaaaagaacctggtgaaagtcccatattctggtatgctccagaatcactgacagagagcaagttttctgtggcctcagatgtttggagctttggagtggttctgtatgaacttttcacatacattgagaagagtaaaagtncaccagcggaatttatgcgtatgattgggcaatgacaaacaaggacagatgatcgtgttccatttgatagaacttttgaagaataatggaagattaccaagaccagatggatgcccagatgagatctatatgatcatgacagaatgctggaacaataatgtaaatnaacggccctcctttagggatctagctcttcgagtggatcaaataagggntaacatggctggatgaaagaaatgaccttcattct

SEQ ID NO: 692 - DNA, 386 bp; single-stranded, linear
  immediate source library: MMLR1DT01
  immediate source clone: 470564
tccttaaatagctgacaatcaaattcatgctatggtgtgaaagactacctttgacttggtattataagctggagttatatatgtatttgaaaacagagtaaatacttaagaggccaaatagatgaatggaagaattttaggaactgtgagagggggacaaggtgaagctttcctggccctgggaggaagctggctgtggtagcgtaggcnttctctctctctgtctgtggcaggaggcaaagagtagggtgtaattgagtgaaggaatcctggggtagagaccattcttaggtggtttgggcccaggcttaaagacttgggattttgggtctatcttatgcctttnctggcttgattttttnntaggagacggnggtttttnccca

SEQ ID NO: 693 - DNA, 266 bp; single-stranded, linear
  immediate source library: MMLR2DT01
  immediate source clone: 475569
cccacgcgtccgcccacgcgtccgggggagagggtggccatgccccgtcaccagcaaggggttaggagcagacatggcctggtggtactccgtggagaggccacttgtcctgagaggtgtctggcagagaaggaacggggggcaggctggcgccacccagcacctgcaacagctgtggacagggcagggggattcctgggcctccacgttccttgttcagtggaaggaagtggaggggcggggggctggtcaccaatgagcctgaa

SEQ ID NO: 694 - DNA, 567 bp; single-stranded, linear
  immediate source library: MMLR2DT01
  immediate source clone: 476160
caccatcctacaagccttctccctggagagcccgtgcccgccggacancctgagcctnaagcccaccgtcagtggccttttcaacattcccccagccttccagctgcaagtccgtcccactgaccttcactncaccacggagaccagatgaaggaaggcaacttggaagtggtgggtgcccaggacggtgccttcagcctcaacagtgggcatggacagggttaatgtctccagagtgtacactgcaggcagccacatttacacgcctgcagttgttttccggagtctgtcccacggcccacacgctcacttgactcatgctgctaagatgcacaaccgcacacccatacacaactacaagggccacaaagcaactgctgggttagctttccacagacataaatatagtccatctgcaatcacaagcacatagccaggtaacccaccaactcccctggatctgcagcccacacgtgggagtctggctgtcaccttcacaagccacagaaacggccacacatgttcacagctcacacgccctctccattcatcgaacttctcagtgtc

SEQ ID NO: 695 - DNA, 698 bp; single-stranded, linear
  immediate source library: MMLR2DT01
  immediate source clone: 476365
actgtgtcctttttaccttgaatcacagtggcttatctaaaaatataagcttttttctgtcatattctgaattccctgaaggtaaggactatgtctgattcctctctttgtcctctgcacccagcgtagggcctgaaacagagtagctagcagtaaagatacnnnnnnnnnnnnnnnnnnnnnnccatccttggcctctggagctaattgagaaggctagggggagttccgctgtagggagaaggatgttgcatccctttgtagattgtgtagcattcaaaacctgctgaacactcaccctcaatgtatattctctgttctggcctgcttcaaggtcagttacactacttcctgggatgggcctttctctggcttaagcttggttgtccctggctttcccaaggatcacagcccaaaaggcacagtggggaaaatttatggcctattcgagaagagtgagcagcctaatcaagccaagccttgatttggggttctcacttcactggtattttccctctgtccctaattgggttttctatagttactagttttccaggcctccaagggagattctgaggcttgatgtgttctgactgtgtcttggctttgtgatgctgagtgccagaaatactctgtactataaaaactaccatcgttctttgaaacaacaaagaggaataaagaacttaattctggtg

SEQ ID NO: 696 - DNA, 296 bp; single-stranded, linear
  immediate source library: MMLR2DT01
  immediate source clone: 478861
gcagtagctntaacaggttggaccaagctatgcaggtgacagagactnttgggatgacgcactgctgcatcaaccccatcatctatgcctttgtcggggagaagttcagaaactacctnttagtcttcttccaaaaggcacattgccaaacgnttctgcaaatgctgttctattttccagcaagaggntcccgagcgagcaagctcagtttacacccgatccactggggagcaggaaatatctgtgggnttgtgacangggctcaagtgggctggtgacccagtcagagttgtgca

SEQ ID NO: 697 - DNA, 1551 bp; single-stranded, linear
  immediate source library: MMLR2DT01
  immediate source clone: 479403
ccatctccaccgaaacagaagtccagccctgtgaataaccaccacagcccgggtcagacaccaacacttggccaaccagaagctagggctcttcatcctgctgctgtttcagccgcagctgaatttgagaatgctgaatctgaggctgatttcagtatacatttcaatagattcaaccccgatggggaagaggaagatgttacagtacaagaatgactttctcttgattgttgaaaaatcattacctgtggaatggctaggaatattggaagcagcatagtgttgatgtacgcaaaacaagacagcttggtcagctacaatcttggaatccctgtcttcttaatnnnnnnnnnnnnnnnnnngacgtataatgtagtatatcaatcctttcaaactatttagataaccacttgatgcacaaataggaaaaagcagattgtggcagtgtcgccttttgtggttttatgattttcaaattgaatttaatgattacaccctttcccttcatagatcttttttcttttttttaagccatgctgtgacctacaagcaaactaaatagccaacatttctgaacccctaagtctcctgtgccaagctgctccctgaaatggacttcttcatctgtacagatttgttaaaccattctatttgcttcttaataataggatttatattagtactcattaccattggacacaatgacataagtactctccacagtaaagcagacctttcacaacagtnactctgtgtcctaaaattttccaacatagatgtgatttatataactttgttgatacgtaaattgtcttggggtttacggaaattaactattatgtttgcactaagatttgctgggagtggtaggtggacatatctatatatcaataaggactaaccgttttttttgtacataggagattgataatactgtatttgttttaagcccacagtgttttactccactttcaaaaagatcaatttggccactttttttcattttttttaatggaaataagatttggtctctcattttaggttaaatgataactagaaagattaaactagacagatagtttaggtggagtatatttttaaaactcagaacatgtatattggtcctgtgttacccaagtttatatgtgacagttgaaaaagaaattcccttgaaatgatcatgaggttaaaattttcttcattaggggacttggagaaccagtagtcgtaagattagttgatagtttcactcccaagcaatgaattgcttctgtgtgtttccctgtaggactcaatagtaaatgctgtctgtcttacacatttataaggaccctgcaagacgacgacaaaggcctttggcctgtgctactaaacaagaagcctatgaaaaatttcttctttaaacttgttttttctctttccagtaagttcacatttggataattttaaaaagaaaagtaattacctttgtgtttccagaacactataattggggtgtatcttaattcagttaaatattattagtagacctggattttcccccttgacccc

SEQ ID NO: 698 - DNA, 2291 bp; single-stranded, linear
  immediate source library: HNT2RAT01
  immediate source clone: 486270
gtctcaaataaataaatatgngataatgcagtcgggagaagggagggagagaattttattaaatgtgacgaactgcccccccccnnnacccccccagcaggagagcagcaaaatttatgcaaatctttgacggggttttccttgtcctgccaggattaaaagccatgagtttcttgtcaaaaatccccgacctgggctcgcctcccccacctcctcctctgcttcactgtcccgggcccagcagttgccggcgcactcatgctccgagncctgagccaaccggagncganacaancacagggccctgcgcgcaacccggaacctaagnaggcctgcacggtgcagactctcctgctcccaccggcgcccttccctctagagacgctgagagaacgggagctagtagcgcccccacccaacgccacctcggagactccggctccttctctctcaacttcgaacaatacaaagtgtgctaggagaagacaagatggcgcccagcaggaggagcggagaaaggcaggggtgtaaatctggcttccaaactggaagcgtcaacaaaggcgtgggaggtctaaccgcgcaggcgtgcagcttcggcaagctttacaattccaacagcgcgtccaaaacgtggtccctgactgagacttattttacgccactagagtgagggtgggtagcgtcagaaagagcggggcacggggcgggccagcttcgccgcgggaaaagaacgggaggcggagtgtccgcagcgcgcacgcgcaaacgaaagtcaatggcggtctggagagactggcggaagctagctttgcaatatggcggccgaggcggacggaccgcttaaacggctgctcgtgccgattcttttacctgagaaatgctacgaccaacttttcgttcagtgggacttgcttcacgtcccctgcctcaagattctcctcagcaaaggcctggggctgggcattgtggctggctcacttctagtaaagctgccccaggtgtttaaaatcctgggagccaagagtgctgaagggttgagtctccagtctgtaatgctggagctagtggcattgactgggaccatggtctacagcatcactaacaacttcccattcagctcttggggtgaagccttattcctgatgctccagacgatcaccatctgcttcctggtcatgcactacagaggacagactgtgaaaggtgtcgctttcctcgcttgctacggcctggtcctgctggtgcttctctcacctctgacgcccttggactgtagtcaccctgctccagggnctccaatgtgcctgctgtggtggtggggaggcttctccaggcagccaccaactaccacaacgggcacacaggccagctctcagccatcacagtcttcctgctgtttggggggcttcctggcccgaatcttcacttccattcaggaaaccggagatcccctgatggctgggacctttgtggtctcctctctctgcaacggcctcatcgccgcccagctgctcttctactggaatgcaaagcctccccacaagcagaaaaaggcgcagtagagccagctactggagtcattccgtttccactcattcacccaacctcagggttctccccatctgagccagcctgctggtgtgacttactcatcctccattcctctgcacttgcagactttctgagccagggttttcttttagtggaaacaaatggttgatggatccagatccttagaaaaggagaggatgggggtagagtctcccaagccaaaattttgacatttgagtgctttcgtaagccctgtacatgtactattaattcagtcattcagccaagcctcctcctctagcagcaatttccagctgtgtaacactatcctgggcaaatgttttaccctgtcctccagcctccctgcttcccttctggccctggaagactgagtctggacggcagagtggagggactgggaggctgtggctgcctccctccctcagcccggctgggactgtctcccggaccccagtgctggggtgggggaagggggacggagaatgactcaggcagggccccagggtggggtgaggaggttcctgctctggcaggtctaggcggaagggagtggagatggggctggttcctgctgcagtgaggggaacagatgggacaataaagactggagactcagttgaaaaaaaaaangaaanaaaaaagnananaannnanaanananagannnngnnnaggnngagnggngagcngtnggggggccnntttgggggtncccg

SEQ ID NO: 699 - DNA, 1456 bp; single-stranded, linear
  immediate source library: HNT2AGT01
  immediate source clone: 488842
gaaagatagctctatctaattgtttttgtagcagctgaaactaaaataatttgagtgctgaaaccttagttatgctttgttagagatcatttgaaaatattccacacttaagcattcattgtttgaagaactagacagtttgtactcaggtacttacacctctttttccctcctcactctagatgaaatcgtggacactttgggtgaaggagcctttggcaaagttgtagagtgcattgatcatggcatggatggcatgcatgtagcgcataggttgcattcttattgaatattaccttggtttcacagtctttcagactcatgatagtaaagagcacctggcaatgatggaacgaatattaggacccataccacaacacatgattcagaaaacaagaaaacgcaagtattttcaccataaccagctagattgggatgaacacagttctgctggtagatatgttaggagacgctgcaaaccgttgaaggaatttatgctttgtcatgatgaagaacatgagaaactgtttgacctggttcgaagaatgttagaatatgatccaactcaaagaattaccttggatgaagcattgcagcatcctttctttgacttattaaaaaagaaatgaaatgggaatcagtggtcttactatatacttctctagaagagattacttaagactgtgtcagtcaactaaacattctaatatttttgtaaacattaaattattttgtacagttaagtgtaaatattgtatgttttgtatcaatagcataattaacttgttaagcaagtatggtcttgataatgcattagaaaaattaaaattaatttttctttttgaaattatccatttttaaatacctttgaaatatcctttgtgtccagtgataaatgtgattgatcttgccttttgtacatggaggtcacctctgaagtgattttttttgagtaaaaggaaatcttgactactttatattcttaaaggaatattctttatatacttcaaatttagaacttaactttaaaagtttttcttctgtaattgttgaacgggtgattattattaactctagataagcaggtactagaaaccaaaactcagaaaatgtttactgttagaattctattaaattttaagtgttgtattctttttcattgggtgatgtcagggtgataaccagacattcatggaaaggcatgcagtttgtccattgtgacagtttgtttaataaaaccacatacacactttatttaagattaaaatctaactggaaagtcagcttggaaaatggacatttccaagtatgtttggtgagtcacagatataaaaatagaaattctgatgagaggtttcagtttttaataccaagtccttaggagtcttaacattggccagcatctgtttatcaaatgacataaatacgtaaacctataagaattaagtttattaat

SEQ ID NO: 700 - DNA, 1516 bp; single-stranded, linear
  immediate source library: HNT2NOT01
  immediate source clone: 493135
cttctgtgagtttttccggtgcacgcgagtgcttctgaaacgtcagctgcgctcccctaggagtgctgagcccgcggaaccgcagccgaatnngnnaaanccctgaggctgatgtgaatccaaaggcctatccccttgccgatgcccacctcaccaagaagctactggacctcgttcagcagtcatgtaactataagcagcttcggaaaggagccaatgaggccaccaaaaccctcaacagggggcatctctggagttcatcgtgatggctgcagacgccgagccactggagatcattctgcacctgccgctgctgtgtgaagacaagaatgtgccctacgtgtttgtgcgctccaagcaggccctgggggagagcctgtggggtctccaggcctgtcatcgcctgttctgtcaccatcaaagaaggctcgcagctgaaacagcagatccaatccattcagcagtccattgaaaggctcttagtctaaacctgtggcctctgccacgtgctccctgccagcttcccccctgaggttgtgtatcatattatctgtgttagcatgtagtattttcagctactctctattgttataaaatgtagtactaaatctggtttctggatttttgtgttgtttttgttctgttttacagggttgctatcccccttcctttcctccctccctctgccatccttcatccttttatcctccctttttggaacaagtgttcagagcagacagaagcagggtggtggcaccgttgaaaggcagaaagagccaggagaaagctgatggagccaggtcagagatctggttccagctttcagccactagcttcctgttgtgtgcggggtgtggtggaattaaacagcattcattgtgtgtccctgtgcctggcacacagaatcattcatacgnnnnnnnnnnnnnnnnnnnnnnnnnnnnnnnnnnnnnnnnnnnnnnnnnnnnnnnnnnnnnnnnnnnnnnnnnnnnnnnnnnnnnnnnnnnnnnnnnnnnnnnnnnnnnnngtacccctgctgtttgcttttggtaatgtgatgttgatgttctccccctacccacaaccatgcccttgagggtagcagggcagcagcataccaaagagatgtgctgcaggactccggaggcggcctgggtgggtgagccatggggcagttgacctgggtcttgaaagagtcgggagtgacaagctcagagagcatgaactgatgctggcatgaaggattccaggaagatcatggagacctggctggtagctgtaacagagatggtggagtccaaggaaacagcctgtctctggtgaatgggactttctttggtggacacttggcaccagctctgagagcccttcccctgtgtcctgccaccatgtgggtcagatgtactctctgtcacatgaggagagtgctagttcatgtgttctccattcttgtgagcatcctaataaatctgttccattttgatgacagaatggcagtgcctgattcttagtaagt

SEQ ID NO: 701 - DNA, 247 bp; single-stranded, linear
  immediate source library: NEUTLPT01
  immediate source clone: 497005
caagtagctgggattgcaggtgcatgcctgagaaataataattcttgccgctaatttagtccttctgtatgttattttaagtaagtatttagtctgttcctttagtaattcttctataagtcatggaagacagctactgttggtaactgctggaatgatgtgcagactgagaatatgaaaacagaaactctgacactgaaagtgattggtcacataggcaaatgttgatttattttccaaaaaggaa

SEQ ID NO: 702 - DNA, 539 bp; single-stranded, linear
  immediate source library: NEUTLPT01
  immediate source clone: 497024
gaaaaaaattacagaactctcagtttcatagtaaagataggtaagtagtgtctggataatgtccagaggatagactgaaactctgtgataaacgtgagcaggcagcaggatgctacctgataactgagtataacagcatgcaggggaggactgtgtggctggaggcagctgcggtagaagttggcagtgccactgtggacttttaaagggacaactctgggtacaagcctgaagtgtaaggaggacataaaattaaatacaattgagcttgtctccttgaaaactggttctctctttttactacattaaaaagatcaagtggacagttaagtcattaattcaggtaattccaatcacaaaactacttttttcctgaagtgtcctaatcattgatttttaaaaatgatatttctttcatcataaattatcagcataattgctttggttccatatttcatattaagcttgggctgagtgatgtttaaagcctcctgcttaccttccccccttttcttcctattttattttacttaataccc

SEQ ID NO: 703 - DNA, 192 bp; single-stranded, linear
  immediate source library: NEUTLPT01
  immediate source clone: 497034
catgaacaaccaatttggggtaccacttgcatagcagctgaatgccagccctgaaaaaggccaccataaagaaagtaccattttctggcggtgcagtggttcatgncttattccagcantttgggggcanncggggggnancnnnncggggttttttnnnccccccncaaangggganctttttttaaaaaa

SEQ ID NO: 704 - DNA, 225 bp; single-stranded, linear
  immediate source library: NEUTLPT01
  immediate source clone: 497391
gggacacgttgcctcatatgttgtgtaatttattttggtgtctgatccatgaaggattgtttttcctgattcccagcactgaagaatagggccgggaacatagtaggtgctcaggaaatctcggctgcctatctggaagaattagcacctcggctctgccaggagctggggccgtggcgtcaggcaaccaagagacagcccctgcccatgcgagcttctngtgga

SEQ ID NO: 705 - DNA, 1276 bp; single-stranded, linear
  immediate source library: NEUTLPT01
  immediate source clone: 497471
agaatacattgtttaaattcacaaaattagcataattgcagtgctaatgaatatcggaatatgtgcacagtaacatttggactattcattggagagtttacccatacatttagcaaattgaatggccaaaacatttgactccagtgagggctcaagttagatccctatagaaagaggacacttcatcttacttaagtcatagttaagatctgtgatacgaaccatagatattgcctgacaaagcagaaatcaccaagtttcccccttttgaattaccaccaagaagtgttgaaacaccaaatagatatcatgttattttgggcatttgcagttttcttccctgctgcatgtaatgtctcagaatcaacattcttttaaaatctagactatattttgaggcaatgaattacttatattcaacttaggcttgttttgacattcagtagaactttaagttcaatctaaaggcttcagtccacatttttttatacgttgtattttaaaaacgtttgaaaggagtcttacacctgtatcatgaaaactgaatccttttgaaataccactatatgaagagagagatgaaatttagtgaacagaattgaaaaggtgctcataatttcactatgcaaacttaccccagtctctaaaaaagtaatttagatttaaagttctttgatgtatttgattttctaaatctttatggttatgatttggaataaaatgtgcctaatcctgtgttacattctgttcttaaatctgaatgccttctcatttaattctgaggaaatatcacacaagtgtcttcattgaccttgaagaaatgtatatacagttgccttataaaacaacataaatttagaccataacttttatagagaaagggttttgtcaaatgttttctgaaaatctgagtaattcaaagcatgcctctgcccctttaatatttttaataacctgcattgttgctgtctgccaaatattaaattgaaatcttcatttcaattttattatctggaaagggcactggattgctctgcaaccaaagaaagcaatatggaatgaaaaaactcattcacttttgtcttattttcttttaaggtgtattggcatgtaatttgcatagagaaggtcctctggttagtctctcaaattgaggctgtttagggaaatccttattcagttggtggcagtggttggtttaaagtagaaggaaataagatcgccttaataccagaaatgattagaagtgctgatttagattcaacaaataccatat

SEQ ID NO: 706 - DNA, 228 bp; single-stranded, linear
  immediate source library: NEUTLPT01
  immediate source clone: 497557
gcatccaccgtttggtcattccagatagccgccgtatacaacacggcgtggttataaatttccgcaatggcagcacagtcggctttgcgggcaaaacggatggacatgtctggcctcaataaaataatgatgatgatgttatcaatactatcgaaaacagcccgaagcaacggattcctcgatgaaattattgcgtgttgcagaggggatgtgacggctgcaaacaaa

SEQ ID NO: 707 - DNA, 206 bp; single-stranded, linear
  immediate source library: NEUTLPT01
  immediate source clone: 497670
caaattgtatcatataagttgtggaatagacttcatatagcaaatcctgagtaactggggattggaatcaaaatggttcttttcatgtgaattatgaaatactgtattacatataaaacgttaactggaaacttaaaatatagaaggctttactgtttgtttccagtcatttaagccacctaagtgccctgtcctaactctcagca

SEQ ID NO: 708 - DNA, 243 bp; single-stranded, linear
  immediate source library: NEUTLPT01
  immediate source clone: 497826
agtaattctttatgactagtttggtttctacttgttgcataagtataaattagggaaatcagtggataattaaagtgttctttggatttttctcttttagtatctatttagatacattgatccggtttctttaatgctgagtttctcagccttggtgctattgacaatttgggccggtgaattctcttttattgtgaattgttttggatatttagcagcacagttggcctcttcccacaagat

SEQ ID NO: 709 - DNA, 895 bp; single-stranded, linear
  immediate source library: NEUTLPT01
  immediate source clone: 497850
ctagcccccgaaagcgcaccccggagcctgctaccgagaccaattaggacatggcacccgggggttataattcccgggagggccacaggaaggcgaggcaactttggagagtgccagtgcgcgcgcaggggtcggggccccggcctttgccgagtccaagctgtgtctctacggtttcggggaaatcggattcggaaatccttacggcttggcagctcctgttctaaagactttgggcggaaaccaagtggagctgggttcccgttcttgccaacgtaggcggaaggggctttctgtttagtttttctccaaccttgcctggggcgcctatgatggagaccctcagcccctagggactccatcttttgaccttgaagtctcgctcaaacattcccctaaaagaacgggggtgagggagaatggaaggcaaaaagagggaaaaaagcaaataaacttcggaatcgggacaacttaaagtctcgatatgagcctcggattgtattcgaactcctgggttctagacccagctctgctactaacttgtctgaccttccccatttataaactgttgtgggtgagaggtggggactaggtgaactctgagagccctgcactcggcgcggacgagggatttaggggaaagtgtgctgtattccccgcgagccttccccagcggccccgcctccccgggtgaatccccggcggccagcgcagtcaggcagcgatcctggcggctgccggggccggcagcttcctgggaaagttacttcttgttggagccggcaataggcaaagtgtgttctgtgaaatccgcagagccgagattgactacgttccgggaatgagagggctgtgtcattcccctcattgcctgctgcattgacggcgtaacagg

SEQ ID NO: 710 - DNA, 112 bp; single-stranded, linear
  immediate source library: NEUTLPT01
  immediate source clone: 497960
cccctttttttcttttgagtttatttttgttggatttttctgctattttctgtgaggccaagtgtgattttatttttcattcctgaagtcttgttaatataggaaagaacgt

SEQ ID NO: 711 - DNA, 489 bp; single-stranded, linear
  immediate source library: NEUTLPT01
  immediate source clone: 497994
acaaaatgtaataaggttagagagtcaagtatcacgttacaaatcagcggctgaaaatgcagaaaaaatagaagatgaacttaaggcagaaaaacggaaactccaaagagaggatcactcgnnnnnnnnnnnnnnnnnnnnnnnnnnnnnnnnnnnnnnnnnnnnnnnnnnnctccgctctgcattggataaaacagaagagctcgaggtgagcaacggccacttagtgaagcgtctggaaaaaatgaaagcaaatcggagtgcactcttgtcccagcagtaaattccagctctgatccaggcaactggttgggtgacttgagagcattgttttcataggcttttctctgtcctgtctggggagcgctgcttcttcccctgccttccgagagacgaagaccgtggcgaagcttggcggnttaggggnttccgtgncatggntnaccccaggggaagccccagcagccaacaggtgcctgtgtntncaag

SEQ ID NO: 712 - DNA, 207 bp; single-stranded, linear
  immediate source library: NEUTLPT01
  immediate source clone: 498105
agaaaataagaatcatttaaaacatacttaagatactatcaaataatatcatatacatgaaaaggtgcttgttaaactataaaatctcccaaatgtacaaccttatttttatatgcacttaggccaggnacgcgcttgcatgcctgtngtcccagctactaggctgagatgggagantcacttgggcacaggggattgggaccagcc

SEQ ID NO: 713 - DNA, 223 bp; single-stranded, linear
  immediate source library: NEUTLPT01
  immediate source clone: 498294
gcagtgtgaagcaggttgcagaaacgtgggtacctcggggcagttaccagaaaaggggctggagattaggaggaagccagccagtttagcagtcaccagtttagaagaggagacttaaccactttttaaattcaagaccccaccttctctaaacagcatagaaaaagctttctgaattatgatattaaacagatgtcttatgacgtttgcccgtttgtcttat

SEQ ID NO: 714 - DNA, 481 bp; single-stranded, linear
  immediate source library: NEUTLPT01
  immediate source clone: 498387
tccaggtcttgaagctaatcagcatctcaagaaagtatccagaaagaacatctgctagttggttataggcggtgggaggaataatatacctaattggttataggtggggggagcatgataagcaaagaaaaggcaaacacaaggaaagatcagatgaaacagaagatgatagtaaaagtgatcctaagtaagaacataatgtaaaattgtcagcagcctcatggggaggaaaaaggaagagtcaactcacttgaagaagagggtcttgagaaatccttagcataaagggctactggtgagattgagatctgagcaggcaaagctcaaaagagagtttggaggttaaaaataatttatttttgcagtagtgtgctttgaaatgtgtaaatcttatttctaatgtatacaaccacatttcacataaaaatatgcaatttatatgccagataaaaataaaacaagtgaatttgcaagtnaaaaa

SEQ ID NO: 715 - DNA, 234 bp; single-stranded, linear
  immediate source library: NEUTLPT01
  immediate source clone: 498413
tagtgactgacgaaaacttgaggatgagtaggagactgtgtaacgagaagaagcaacaaaagaattttaaataccaatgacctttatttttccacaaatattagaactattctgtcagacactgtgccaagataaaaatactttcctttggtgacagagcataaaattgaatctagttggagacatttgttgaagaggcctgtacatctttttctagagcaagagtaagtaaac

SEQ ID NO: 716 - DNA, 382 bp; single-stranded, linear
  immediate source library: NEUTLPT01
  immediate source clone: 498540
gctatcttctaaccaacaaaaagttaataattacatttggaattatacagaattagaaaattggcatttaaaaatactcaataatttgtccctggtttttaattttcaaaatattttctttttgaagagccagattccagtgatcctgcctctcagaaatttccacatttcttatttttcattaggccttaagaagctgcatttgtaaacttgtgtttcattattaaagcttaatttattttttatataaatagtatgtgctttgtgtacatagagaattaagtgaatgagtcacacagatgttggctgttgttaatgtgaaaattaaacagctgtatcacattttgaaaaataaaagtttcatctgaatgaaaaaaaaaaa

SEQ ID NO: 717 - DNA, 132 bp; single-stranded, linear
  immediate source library: NEUTLPT01
  immediate source clone: 498630
cctgactccagtttcttctggcctgagccaatggggcatgttctgtgactgcatttgcatctcggattgtgtttttaaacccattttctcccatatttgcctgaaaaatatatagaaactgatatacaatcc

SEQ ID NO: 718 - DNA, 344 bp; single-stranded, linear
  immediate source library: NEUTLPT01
  immediate source clone: 498780
ctctaagttcacttctttttaagagctccacaagtctgcttgtacgtagttatgtagatttacctgaatatttatcaattcatttgttttccattctttctcatgttatgtctcaggccttttataccagtttctttctgccacaaagacatccttaggaatttagtttagtgatggtctggtgaagacaaattttctcattggttgtccaaaggaagattaattcccaggttgttcttgagaggtatttttgctggnatatggtcaatttgtcagaatatttggcaatggtaaacttttgngcacttaattaaaggatttccaaantnaaanggggnnngggg

SEQ ID NO: 719 - DNA, 485 bp; single-stranded, linear
  immediate source library: NEUTLPT01
  immediate source clone: 499243
gggctgtgacatgcagaaggcacacctgatacttctcctgctcagttttgccctggaccatacaattttggcctgacctggacagagctcccactacagaagcatcctgctcgccccatgctgggacttcctctttctagcatcagacacttgggtttcatgcttatgtgtggttctttccaacactcccagaaaagggtgttgaagattgtggaacctgggagaaataagacatcgtggtgagaaagtgcatccttctcagagaaaagagttaaactgagtatcttcttctggggaaatactggcaggccgagatgggatccataggagagcaacaacagaccatgtcagacatcctgtgtgcatttatcgctggatcctgaaaatagccccgtgaaggcagaaatgtatgtgactagaacgaggccacatgaataagccactgcccactggcaggagtgaaaactgaagcgctccttacctga

SEQ ID NO: 720 - DNA, 1200 bp; single-stranded, linear
  immediate source library: NEUTLPT01
  immediate source clone: 499486
gtctctggttttacctttccttacttcattcattcactcacccagtccttacgaatcaccgaggaacactgggctgagcacatgacagggagcctggagccccggggcctccagcgaggcctgagaagggtggttcgggtaaccactgtgggctctctcccatcacagaaggtggacagggcctacccaggtggaggggaccaccctgcgatcaggtgtttgcgacaggggttgggccagctgaggcaagctgtcttttttcccttttctttttaatagatgcaacatttttataataatcctagagaccttttttctaccaaagatcacagaccagaaaaagttccatctaaaatatcatgcccaggaaagcacatgggatcaaaagtaaaatagcatcatgtgtgatctcgtcttccagcgtgccgctcagttccccgaatccgtgtgcacacgtgtgatctcgtcttcagtgtgccgctcagttccctgaatccgtgtgcacactgcgtatgtgtacgcgcagatgctatactgaactcaacaagatcttggctgtacataaatatttgtaaaagagaccctttgcacctttttactgtaatgttgagacttcattacttaaatgttctacggaaggttctggtgtggttgttggagccggagggagcgtgtcagcacgtgctgagggcatggggcctgccccctgggcacccatccacaagctgggccacggagctccagcttctcaggacaaagccccggggctggcgcatcctgagggtctctgggggtgtttgccaggctcctgggatgggccgctttcagaagccctgcagtgcctccagatggaaaggcgggcccggcctccggttgggtctgcattttggagagtccacaccacggaccaggttttcccccaaggcttggctttgtgtagctactaacttcttggggcattctgagagtgtgggcagagagaattatgtggcctcatcctcccccaaggctgtgcttgcagcccgggcaccttcccactttctagctctggagaggttggattttgcttttgtaaacacatgaatccttatgataaaagtctgtcagtcaaaaatacatttataaattatttaatgccagtcctcatgtaacctcaggtatcttcagcttgtggagaataaatctggtttaataaacagt

SEQ ID NO: 721 - DNA, 296 bp; single-stranded, linear
  immediate source library: NEUTLPT01
  immediate source clone: 499526
cttcccccacggcgtttacagactctcctgcggcaggcggtggaactacaaagggatcggtgcctatatcacaataccaaacttgataataatctagattctgtgtctctgcttatagaccatgtttgtagtaggaggcagttcccatgttatacgcagcagatacttacggagcattgtaatgaagtgtggttctgtaaattctctaatgatggcactaaactagcaacaggatcaaaagatacaacagttatcatatggcaagttgatccggatacacacctgctaaaactgct

SEQ ID NO: 722 - DNA, 286 bp; single-stranded, linear
  immediate source library: NEUTLPT01
  immediate source clone: 499553
agaatatgctgcaaaatttctaaaaaagagaagaagaggacaggattgtcgagcagaaattttacacgagattgctgtgcttgaattgggcaaagtcttgtccccgtgttattaatcttcatgaggtctatgaaaatacaagtgaaatcattttgatattggaataattggctggaatcaacttgtgaatgaaaatgaagattttgcaaaatgttaaactgacaagtagttcatttaaggntgaatactatgtacattcccagaaccgtcttaaggcgtgttatat

SEQ ID NO: 723 - DNA, 238 bp; single-stranded, linear
  immediate source library: NEUTLPT01
  immediate source clone: 499608
gattttttttttcaaacgcagaaattgttttcatagaaaaaatagatcctacttgtttcttatagtattgtgatattgcaaataaaactgaggagatttagatatttctgatgaatttttgaggcattcatctgatagtacatagatacataaaataattactcagaaagccgatattggtaagtggcttccccagtttccattacatttgaatcagcctaggctgaacctggaggat

SEQ ID NO: 724 - DNA, 385 bp; single-stranded, linear
  immediate source library: NEUTLPT01
  immediate source clone: 500205
gggaccctggctttggctgaggctgactaacctctccaccttcaggacctcttcaacgacctgattgcttgtgcgttccttgtgggagccgtggtctttgctgtgagaagtcggcgatccatgaatctccactacttacttgctgtgatccttattggtgcggctggagtttttgcttttatcgatgtgtgtcttcaaagaaaccacttcagaggcaagaaggccaaaaagcatatgctggttcctcctccaggaaaggaaaaaggaccccagcagggcaagggaccagaacccgccaagccaccagaacctgggcaagccaccagggncagcaaagggaaagaaatgacttnggggaggnttctggtgtctgaaacggcatttt

SEQ ID NO: 725 - DNA, 378 bp; single-stranded, linear
  immediate source library: NEUTLPT01
  immediate source clone: 500677
ttttttttttttttgaagtctctcaacatttcatttttaatttttctaatagtacattctttaaaagaagttaacgacttcaattccaaatataaggattaaataatgcaatgaaaagctgtcattttcagtgaagctattgcctaattaccctggaaaaaagtattcttatgactgaactgatgcaaaaatcccttagaaaagcttcatttgttgcctgtaaagagtcttcttaaggtcacttttacttctagactgcccccttgtttccagtgaaagagttttgcttggtaatggcttgtggttccacagtgttttgtgtatgaaaagcgtagactaagagatactactgaagtcgctcaaattgtagattctgcc

SEQ ID NO: 726 - DNA, 261 bp; single-stranded, linear
  immediate source library: NEUTLPT01
  immediate source clone: 500726
taatagactccttcgagaagctaatgaatattctagactgtctgaagaaagacacatgcacagaaaatttgacataattgcaggtagtttacagaccctctgaaagttggccaagatcctgttggcacctatctataggacttcaggcaaacaaaccctgacttacttcttccaagcaggaggtatgtttaattttgtgctgtaaatactggtctttcaatttctggtagtaacataacaacccagggattttgaattttt

SEQ ID NO: 727 - DNA, 191 bp; single-stranded, linear
  immediate source library: NEUTLPT01
  immediate source clone: 501612
tgccntgccttccttcccctgctgagagggaaaagcaaaccccaaactgatatgcttccacgtacaattcatttcaatattcctttacttcatatacatttgtgccttttgacttccatttttaaactggtataacatcttctcaaataaattatgtattatgagttaaataaaatttttagcatgtgttt

SEQ ID NO: 728 - DNA, 81 bp; single-stranded, linear
  immediate source library: NEUTLPT01
  immediate source clone: 501746
actgcttcattttctcaaagtgtttacgtttgaatacataaagactgagttatctgaacactgcttcattatagaaatctc

SEQ ID NO: 729 - DNA, 319 bp; single-stranded, linear
  immediate source library: NEUTLPT01
  immediate source clone: 502018
tttttttaatcatttacttatggaccagaaacacttgcaggctcttgcccctggccttctgtgagaatgttagttagcaatgctcataaaaactcaattcatcaatgtgaacataatttgctatgaacagaaagctcacaaaagggtgaatttgtcagatagacaggtggcctgagatctctccctgatactgaatgatatgaataatagattctggtaaatgtatgccaagacttgagctgtaaacacagctgcctccattcccttccagaaaaacagcttcgaggacgaaagcacaggaaccacggttccacctgag

SEQ ID NO: 730 - DNA, 103 bp; single-stranded, linear
  immediate source library: NEUTLPT01
  immediate source clone: 502031
tgtgactctaagccccagctcccaaccacaccattttgttgccatcgtaactctaatgtttagaatctattgtatactcaaaggtcttggcgtgtcctaaatt

SEQ ID NO: 731 - DNA, 358 bp; single-stranded, linear
  immediate source library: NEUTLPT01
  immediate source clone: 502964
gtacctagcccacatgatttgactcagagattctcttttgtccacagacagtcatcttcaggagcaganagaaaagagtcccaaatgctatatctattcaggggctctcaagaacaatggaatatcatcctgatttagaaaatttggatgaagatggatatactcaattacacttcgactctcaaagcaataccaggatagctgttgtttcagagaaaggatcgtgtgctgcatctcctccttggcgcctcattgctgtaattttgggaatcctatgcttggtaatactggtgatagctgtggtcctgggtaccatggctggtttcaaagctgtgganttcaaaggataaattaatgg

SEQ ID NO: 732 - DNA, 700 bp; single-stranded, linear
  immediate source library: TMLR3DT01
  immediate source clone: 503172
ttggcttctaagagtagttctcagactagcacctcacagttgccttctaaaagtacttcacagtcaagtgagagttctgnnaaattctcttncaagttaaccaatgaaggatgtgaaaccagaagcaaccttttttcaatagactatataaaacggtggcatggaagttggtagctgttggtggctttagtcccaatgtgaatcatggagagctcctaaatgcagctattgaggctctgaaagcaacactggatgtattttttgtcccactaaaagaattggcagatctgcctcaaaataagagctctcaagaaagtattgtttgtgaattgaggtgcaagtctgtgtatttgggcactggctgtggaaaaagcaaagaaaatgcaaaagcagttgcatcaagagaagcattgaagttatttctcaagaaaaaggtggtggtaaaaatatgtaaaaggaaatacagaggcagtgaaatagaagatctagtactccttgatgaagaatcgaggcctgtaaacttacctccagcactaaaacatcctcaagaattactataatgtgtccaaaatatcactgcatacaatatctggtatttgaagagaaaaactgacttttgtatagtataaaacacaggctttcacaaattttgtattgctttttttccagttttgcagaaaatttacattctagttctctt

SEQ ID NO: 733 - DNA, 320 bp; single-stranded, linear
  immediate source library: TMLR3DT01
  immediate source clone: 504312
ggcatttcccgtgggcccccgagacccgcctagatggaggaagcgctgctgggcgccctcttaccgctcacggggagctggggccatggatgggacaggagtctttgtccctgctcagcccggaggctgtgcacggccctcgtcacaaggtgacccttgcagcacaggccgcgggtgccccaggctcggctcagttcttggaggtcaagggcatgggttggggtagtgggtggggaggtgaatgttttctagagattcaaactgctccagcaatttctgtatagttttcacctctgagaattacaatgtgagaaccgctc

SEQ ID NO: 734 - DNA, 1253 bp; single-stranded, linear
  immediate source library: TMLR3DT01
  immediate source clone: 505309
gtacagacgagatctcgatcgaaggcgagatggcggacgtgctagatcttcacgaggctgggggcgaagatttcgccatggatgaggatggggacgagagcattcacaaactgaaagaaaaagcgaagaaacggaaggntcgcggntttggctccgaagaggggtccccagcgcggatgcgttaggnttatnacanccttgagcaatgatngcgattaacccgggccacaangttnttttttnnaaggctngntttcncttttttaacctngggtcccttgagggaacccccccgcgagatggcggacgtgctagatcttcacgaggctgggggcgaagatttcgccatggatgaggatggggacgagagcattcacaaactgaaagaaaaagcgaagaaacggaagggtcgcggctttggctccggtgagtgtggggaaaatggggtagagtngcctagtagggcaggagctacgggttttggagtccccacccacctcataggaacaatgggagaaaggaggagttttcggtgatctcgtgtatgtccnttatagaagaggggtcccgagcgcggatgcgtgaggattatggacagcgtggagcaggatggcgatgaacccggaccacaacgctctgttgaaggctggattctctttgtaactggagtccatgaggaagccaccgaagaagacatacacgacaaattcgcagaatatggggaaattaaaaacattcatctcaacctcgacaggcgaacaggatatctgaaggggtatactctagttgaatatgaaacatacaaggaagcccaggctgctatggagggacttaatggccaggatttgatgggacagcccatcagcgttgactggtgttttgttcggggtccaccaaaaggcaaagaggagaggtggccgaagacgcagcagaagtccagaccggagacgtcgctgacaaggtcctcttgtttgtccaggtgttctcttcaagattccatttgaccatgcagccttggacaaataggactggggtggaacttgctgtgtttatatttaatctcttaccgtatatgcgtagtatttgagttgcgaataaatgttccatttttgttttctacatttaatgttactttcctgtcctaaaattgaaagttctaaagcatagcaaggctgtatgggaacattgtgaagatacttctagggactgaactctatgtattnctnntnttnctnttttttgagatagagtct

SEQ ID NO: 735 - DNA, 169 bp; single-stranded, linear
  immediate source library: TMLR3DT01
  immediate source clone: 505420
gtctccatccattggtgccaggacctgctgggaacaggctgagagggtggttggcccagtgcacagtgcctggcactaacaacctgatcgtgggccaggtgtctgcctcgaaanttgctgaaggcaggcagggtaggacaatgtctggaggctcacggttttatagact

SEQ ID NO: 736 - DNA, 224 bp; single-stranded, linear
  immediate source library: TMLR3DT01
  immediate source clone: 506770
gaaaaattcaataccacattttaaaattattacatttttataattaaaaaaatcacagtaatctcaaataaagtctttgttcttgcttcactatcaggccatatttagaaaataaaatctagtgaagatgaaccttataagccaattttaaattgttatttttgtttaaaatatacagtgcaagaaaagaaataacatatgcacataacaggaatgaaatgaga

SEQ ID NO: 737 - DNA, 3403 bp; single-stranded, linear
  immediate source library: TMLR3DT01
  immediate source clone: 506822
cggtggcggacctcgctctcattcctgatgtggacatcgactccgacggcgtcttcaagtatgtgctgatccgagtccactcggctccccgctccggggctccggctgcagagagcaaggagatcgtgcgcggctacaagtgggctgagtaccatgcggacatctacgacaaaagtgtcgggcgacatgcagaagcaaggctgcgactgtgagtgtctgggcggcgggcgcatctcccaccagagtcaggacaagaagattcacgtgtacggctattccatggcctatggtcctgcccagcacgccatttcaactgagaaaatcaaagccaagtaccccgactacgaggtcacctgggctaacgacggctactgagcactcccagcccggggcctgctgcctccagcagccacttcagagcccccgcctttgcctgcactcctcttgcagggctggccctgcctgctcctgcggcagcctctggtgacgtgctgtccaccaggccttggagacaggctagcctggccacagaattaaacgtgttgccacaccgggagagagggaggcctttgggcggtgggggccacggggagggtggtcctcggactacgtgcgggacaggaggtcagggctggcaagtccctcaggcctccctcgttgccccagcctcgcgggccgcctaactgccccgttccaagggtgccaccggaccccgctggagaggaacttctccgttggctggatttcatcaccacccattcccgattccacgtttcctttaagcggggctggcggagcgcaaggcggcaaggaactggattgcgattggtcagcacgtgcctcggtcggcggtacaattggctgaggcgctgggccttgggaagcattccccgacgggattggtcgtcgctctcgcagagcccgcctcccgcagtacaagcggcccccgggtngngtagnaggaggggactccgggaggaggaacatggcggtggcggacctcgctctcattcctgatgtggacatcgactccgacggcgtcttcaagtatgtgctgatccgagtccactcggctccccgctccggggctccggctgcagagagcaaggagatcgtgcgcggctacaagtgggctgagtaccatgcggacatctacgacaaagtgtcgggcgacatgcagaagcaaggctgcgactgtgagtgtctgggcggcgggcgcatctcccaccagagtcaggacaagaagattcacgtgtacggctattccatggtgagccgcagccccgtcccgccctgccggaggccccagtaccagcttcgaggcccacctgagcctgctgccctgacccgtggccccagctgagcacgcaggcttcctggggttctcccagggtcggcggcagagccctccctccagggcccattgtgttcctgcattcccccatggagcacacgccagacctgaggggtgggacggacacccccaggcatggccggctgtctcctctcctgcctcgggagttggctccttgtctagtatttaatacatccccaaacttggctttattttcanctgcctttgccttcantgtggtgaaagatagtgcgggtgactcagatgtggtggtgcangagctcaagtccatggtggccaccaagatcgncaaatatgctgtgcctgatgagatcctggtggtgaaacgtcttccaaaaaccaggtctgggaaggtcatgcggcggctcctgaggaagatcatcactagtgaggcccaggagctgggagacactaccaccttggaggaccccagcatcatcgaagagatcctgagtgtctaccagaagtgcaaggacaagcaggctgctgctaagtgagctggcaccttgtggggctcttgggatgggcgggcacccaagccctggcttgtccttcccagaaggtacccctgaggttggcgtcttcctacgtcccagaagcagcccccaccccacacatgacccacaccgccctcacgtgaagctgggctgagagccctttctcccatccattggaggtcccaggagtgtcacccatggagaggctatgcgacatggctagggctggttctgccatctgagtttggtttcctggaatgaaaaggcattgccatctccattcctctgccctcttgagccagcacaggaaggtgaggccctgggatagcgcgcctgctcagataacacagacctagttagctagtagcaaccgtgttttctccagatctgtctagatacaaaggtcagaaatcttatttttatacttttatattgtggaaggacagcatgcaacactcacatgtagtgtgtgggtttacttgaacatgttctttttaacatgtagttatgaaaatctccttttttgcctctactggtgaggaaacatgaggatcagaggccacatttttaattattgttagtgtatttggaagtctgaattggagatgtttgtacctctgtctaaacagttcccttgagaacttccaagcctccggcatcttttcctggtgagtgtttctcctgtgcttggttgtgtataatggagctaactcctaagcggtggggtgaatgtggccgccttagttctggaagctactccagttatgttctgtttcttcaagctgtgatccagaaagatttttgtgcccccagatgcctcttgataggagaggcaacatactccaaatagttgggttcttcagggaagctattagaaactcaggtgacttgttagagcactaacttggtcagagccaaatcctggcaaacgctgcctgaccttcactctgtggttggggcagtgagaaccactgaggtccaatgatgagacttggaggtctggatccagtctctctttgttttaatgtgacttaggtgctgtcaacattagcaagataatggaaatcacgacgccagtgggtgcttacctccctgctaggcatgcaggggctggcggttggcaggggaaggaggcccagtgagccgggtcccttaggggagggagagtttgtcctctttgccccacagtctacccttcagggccttgtggcagtgccagtgttcggggggtgtctgggccactgagtacccactcggtcgtggttgtgctggcctcttgggtgagtgaacctgtgaagcccaggaggtggtgttggctgcagggtacacaaatactgagtggtggtcttttgttacaggcttagcaacaaagctgtgccctgggcatggggggctgtagtgtagctacagttgtgcgtttgtgaaatggcttagctttccatgttgctgagaggaacctggacatggtcccgggcatctgaatgatctgtaggggagggagttcaaataaagctttattttgttcantttc

SEQ ID NO: 738 - DNA, 1017 bp; single-stranded, linear
  immediate source library: TMLR3DT01
  immediate source clone: 507473
ccctccccagcaccacgcaggcagccccctagccctgcccctgccccgtcccacagtggtttgcagggtggggttccatgctgtggccctggcacctgcccctgggctgggacagcccactgttccgtgctgcccaagaaggctcagcacaggcacaaaccattgcccggcactggcccgtgctgcctgagaaggattggcacgggcacagaccactgcccccacctgaccctgcgccatctacccaagaaggctcggcacgggcaccaaccacttgcctccaactgccccatgctgcctggagaaggcactgcacggccacccccaactgccccggcactgtccctacccgggcagccatgcgagcggctggaactctgctggccttctgctgcctggtcttgagcaccactgggggcccttccccagatacttgttcccaggaccttaactcacgtgtgaagccaggatttcctaaaacaataaagaccaatgacccaggagtcctccaagcagccagatacagtgttgaaaagttcaacaactgcacgaacgacatgttcttgttcaaggagtcccgcatcacaagggccctagttcagatagtgaaaggcctgaaatatatgctggaggtggaaattggcagaactacctgcaagaaaaaccagcacctgcgtctggatgactgtgacttccaaaccaaccacaccttgaagcagactctgagctgctactctgaagtctgggtcgtgccctggctccagcacttcgaggtgcctgttctccgttgtcactgacccccgcctcttcagcaagaccacagccatgacaaacaccaggatgcatgctccttgtcccctcccacccgcctcatgacccagcctcacagaccctctcaggcctctgacgagtgagcgggtgaagtgccactgggtcaccgcagggcagctggaatggcagcatggtagcgccttctaacagnttaaatagatcacatttgcttntaaaattaaaaaa

SEQ ID NO: 739 - DNA, 1933 bp; single-stranded, linear
  immediate source library: TMLR3DT01
  immediate source clone: 508644
agtccacctctgcaaaatggctatgacagatctcaccccataggatggtcaagaagattgaataaagtaatacacgtaacagcgcctaaacaggtgtcgggcacatagtgctcagaaaatgttggctcctattaaagtttgacccctttgcttcattcccacccccaggaatggcccccagaacatatacaacctttacgagcaagtcagctacaactgtttcatcgctgcaggcctttacctcctcctcggaggcttctctttctgccaagttcggctcaataagcgcaaggcctacatggtgcgctagggccccggcgcgtttccccgctccagcccctcctctatttaaagattccctgcaccgtgtcacccagntcgnggtcccancttgcnggngcctntgtgggcgagactccgtccccaaagaaaaagaaaaaagggaactggagcggagggccctggagtgggaggagccagggctggtaaaggtggagacccctcaaggtaggagaaacaagagcggggttcctgagaggtgcttgagttgaatggaggacatgggaggaaaagagagtgcttgttccagaaatgtgtagctgggccttgttttcccagtaatccacccaccgccacttcaagaagaaatgatatgaagaagtgccggttctccctcccctcttccgcactgtcccgtgatgatgacgcctccagagaggacgataatctgggttcctgggagagatggcttggtcactattcccacccttgcctcgaccacttgtctcaatgtcaccacctcacgccctgttccagataatgctcggaatatttttcaatgtccattccgctgtgttgattgaggacgttcccttcacggagaaagattttgagaatggcccccagaacatatacaacctttacgagcaagtcagctacaactgtttcatcgctgcaggcctttacctcctcctcggaggcttctctttctgccaagttcggntcaataagcgcaaggaatacatggtgcgctagggccccggcgcgtttncccgntccagcccctnctntatttaaagacttcctgcaccgtgttacccaggnngggtnccaacggccctcgctcttccaatactcacgccctagctacagaggtcaaggaaggtttccccaggagcagttttggtttcagacggcgccgtctcccgcgaaagtcctgagaggagcccagccttttccgcctgccgcccccggatgggatggttgaggccggggccacgccccctctgcccccctgcgagggcatcctggagctttctcccaccgctttccgagcccgcttgcacctcggcgatccccgactcccttctttatggcgtcgctcctgtgcctgtgggccgaagctggccgcctgcggcatccgtcctcagacgncctggggagtgcatcatgttgataaatgctcggaatatttttcaatgtccattcccgctgtgttgattgaagacgtccctttcacgggagaaagattttgagaatggcccccaagaacatatacaaacctttacgaagcaagtgcagctacaactgtttcatcgctgcaggcctttacctcctcctcggaggcttctctttctgccaagttcggctcaataagcgcaaggaatacatggtgcgctagggccccggacgcgtttccccggtnccagcccctcctctatttaaagactccctgcaccgtgtcacccaggtcgcgtcccacccttgccggcgccctctgcgggactgggtttcccgggcgagagactgaatcccttctcccatctctggcatccggcccccgtggagagggctgaggctggggggctgttccgtctctccacccttcgctgtgtcccgtatctcaataaagagaatctgctctcttcaaaaa

SEQ ID NO: 740 - DNA, 1970 bp; single-stranded, linear
  immediate source library: MPHGNOT03
  immediate source clone: 512988
gggtccccgacttttccgntgncccaaacctgttcccagcccgaccttctgtcttaaggaatttccttntttttgcagagncacaattaagaatgggaagaaagttgtcttaaacccggattccccatggttcagaaaatcatcgaaaagatactgaacaaggggagcaccaactgacaggagagaagtaagaagcttatcagcgtatcattgacacttcctgcagggtggtccctgcccttaccagagctgaaaatgaaaaagagaacagcagctttctagggacanntnggaagggntttanatggtttnactanttntttngggggnntnntnntttttgganttnttttnnnaaagngtttttctttcatgtaaggtctcattggagtttgccagttgtgctgaagtgttttccacctgttaaaaaacacaagcttcatttcccctagttcctactgactttcagacctgaaaagcagaccccctggttttttgtaaaagtttagggttgaagtgcagagatttcacaataatattgcactgggtatataactggttgccaccacctattagccatgtcactcagagacaatattatttagtttatctgagactcagcaaaacagggaaaataatggtagctacatcatgaggttgctttgaggctcaagtgaggcccagtatgacaaagagcaataggctctggctgttttagccagtaaaacagtgtagactgccactcctccaccccacgtcacccccattcctaaaagagcatcccaagcctagaggtccttgccacacagcacagctgtcacaggcagtacccacttgggtgccaggctggggaaactgcattcagaaaactcgggccgcaggcacctcctcgccagctcttccgctcctctcacagccgccagacccgcctgctgagcccccatggcccgcgctgctctctccgccgcccccagcaatccccggctcctgcgagtggcactgctgctcctgctcctggtagccgctggccggcgcgcagagggagcgtccgtggccactgaactgcgctgccagtgcttgcagaccctgcagggaattcaccccaagaacatccaaagtgtgaacgtgaagtcccccggaccccactgcgcccaaaccgaagtcatagccacactcaagaatgggcggaaagcttgcctcaatcctgcatcccccatagttaagaaaatcatcgaaaagatgctgaacagtgacaaatccaactgaccagaagggaggaggaagctcactggtggctgttcctgaaggaggccctgcccttataggaacagaagaggaaagagagacacagctgcagaggccacctggattgtgcctaatgtgtttgagcatcgcttaggagaagtctnnnnnnnnnnnnnnnnnnnnnnnnnnntgaagattctatgttaatattttaggtgtaaaataattaagggtatgattaactctacctgcacactgtcctattatattcattctttttgaaatgtcaaccccaagttagttcaatctgggttcatatttaatttgaaggtaggaatgttttcaaatgttctccagtcaatatgttaaatatttctgaggagacctgcaacatgacagccactgtgatagaggctggcggatccaagcaaatggccaatgagatcattgtgaaggcaggggaatgtatgtgcacatctgttttgtaactgtttagatgaatgtcagttgttatttattgaaatgatttcacagtgtgtggtcaacatttctcatgttgaaactttaagaactaaaatgttctaaatatcccttggacattttatgtctttcttgtaaggcatactgccttgtttaatggtagttttacagtgtttctggcttagaacaaaggggcttaattattgatgttttcatagagaatataaaaataaagcacttatagg

SEQ ID NO: 741 - DNA, 1732 bp; single-stranded, linear
  immediate source library: MPHGNOT03
  immediate source clone: 513237
gcaattcattgataaactctacctccaattgattgacgtcactaagaggcttgtgtagaagtacaccagcatcattgtagtagagtgtaaacctttttccatgcccagtcttcaaatttctaatgttttgcagtgttaaaatgtttgcaaatacatgccaataacacaggtcaaataatatcttctcatgaggaatttatgatcttttaagtttctatacatgtattcttataaggcggcccagggtctactatattagaatagatgaagcaggtagcttcttttttctcaaatgtaattcagcaaaataaatacagtactgccaccagattttttattacatcatttggaaaattagcagtatgcttaatgaaaatttgttcaggtataaaatgagcagttaaggtataaacaaatttatgcatgctgtgacttagtctatggatttattccaaaattgcttagtcaccatgcagtgtctgtatttttatatatgtgttcatatatacataatgattataatacataataagaatgaggtggtattacattattcctaataatagggataatgctgtttattgtcaagataaagtaaaatcgttctcttcaattaatggcccttttattttgggaccaggcttttattttccctgatattatttctatttaatactctattctctcaagaaaaaaaaaaaagtttgttttttctttattgtccttcatagcaggccaagtattgcctctctgcaatagacagctactgtcaatacatgctgtaatttgacattctgggtcacagatataaggtatttaaaatctatttatgctttatagagaaaccagacattaaaacttcatgcactacttatttcgaattactgtaccttatccaaatttacacctagctattaggatcttcaacccaggtaacaggaataattctgtggtttcatttttctgtaaacaactgaaagaataattagatcatattctagtatgttctgaaatatctttaagactgatcttaaaaactaacttctaagatgatttcatcttctcatagtatagagtttactttgtacacgtttgaaaccaactactgtagaagatgaggaatctattgtaattttttgctttattttcatctgccagtggacttatttgaaattttcactttagtcaaattattttttgtattagtttttgatgcagacataaaaatagcaatcattttaaattgtcaaaatttccagattactggtaaaaattatttgaaaacaaacttatgggtaataaaggctagtcagaaccctataccataaagtgtagttaccatacagattaatatgtagcaaaaatgtatgcttgatatttctcaactgtgttaatttttctgctgtattccagctgaccaaaacaatattaagaatgcatctttataaatgggtgctaattgataatggaaataatttagtaatggactatacaggatgttaataatgaagccatatgtttatgtctggatttaaaaattttaaacaatcatttactatgtcatttttctttaccttgaagaacataaactgttatttcacttctacaaatcagcaagatattatttatggcaagaaatattccattgaaatattgtgctgtaacatgggaaagtgtaaatgtttttcatggtttctatcaatgtgaaataaaatttaattctgaaaaaaaa

SEQ ID NO: 742 - DNA, 1879 bp; single-stranded, linear
  immediate source library: MMLR1DT01
  immediate source clone: 516292
aagcttctgggtatttctattgcgcgaggcattgtgggttgctgggcggcccggtctcggagaagaggggagagtggcgggccgctgaataagcttccaaaatgatgcccacaccagttatcctattgaaagaggggactgatagctcccaaggcatcccccagcttgtgagtaacatcagtgcctgccaggtgattgctgaggctgtaagaactaccctgggtccccgtggcatggacaagcttattgtagatggcagaggcaaagcaacaatttcttaatgatggggccacaattctgaaacttcttgatgttgtccatcctgcagcaaagactttggtagacattgccaaatcccaagatgctgaggtgggtgatggcaccacctcagtgaccttgctggctgcagagtttctgaagcaggtgaaaccctatgtggaggaaggtttacacccccagatcatcattcgagctttccgcacagccacccagctggcagttaacaagatcaaagagattgctgtgaccgtgaagaaggcagataaagtggagcagaggaagctgctggaaaagtgtgccatgaccgctctgagctccaagctgatctcccagcagaaagctttctttgctaagatggtggtggatgcagtgatgatgctcgatgatttgctgcagcttaaaatgattggaatcaagaaggtacagggtggagccctcgaggattctcagctggtagctggtgttgcattcaagaagactttctcttacgctgggtttgaaatgcaacccaaaaagtaccacaatcccaagattgcccttttgaatgtcgagctcgagttgaaagctgagaaagacaatgctgagataagagtccacacagttgaggattatcaggcaattgttgatgctgagtggaacattctctatgacaagttagagaagatccatcattctggagccaaagttgtcttgtccaaactccccattggggatgtggccacccagtactttgctgacagggacatgttctgtggctggccgagtacctgaggaggatctgaagaggacaatgatggcctgtggaggctcaatccagaccagtgtgaatgctctgtcagcagatgtgctgggtcgatgccaggtgtttgaagagacccagattggaggcgagaggtacaattttttttactggctgccccaaggccaagacatgcaccttcattctccgtggcggcgccgagcagtttatggaggagacagagcggtccctgcatgatgccatcatgatcgtcaggagggccatcaagaatgattcagtggtggctggtggcggggccattgagatggaactctccaagtacctgcgggattactcaaggactattccaggaaaacagcagctgttgattggggcttatgccaaggccttggagattatcccacgccagctgtgtgacaatgctggctttgatgccacaaacattctcaacaagctgcgggctcggcatgcccaggggggtacatggtatggagtagacatcaacaacgaggacattgctgacaactttgaagctttcgtgtgggagccagctatggtgcggatcaatgcgctgacagcagcctctgaggctgcgtgcctgatcgtgtctgtagatgaaaccatcaagaacccccgctcgactgtggatgctcccacagcagcaggccggggccgtggtcgtggccgcccccactgagaggcaccccacccatcacatggctggctggctgctgggtgcacttaccctccttggcttggttacttcattttacaaggaaggggtagtaattggcccactctcttcttactggaggctatttaaataaaatgtaagacttc

SEQ ID NO: 743 - DNA, 1622 bp; single-stranded, linear
  immediate source library: MMLR2DT01
  immediate source clone: 520251
ccgatttctacgttgagatgaagtgggagttcaccagctgggtgccccttgtgtctaagatgtgcccaagcgatgtgtaccgcgtgtggaagcggggtgagagcctgcgagtagacaccagtctcctgggcttcgagcacatgacctggcagcggggccggaggagcttcatcttcaagggccaggaggcaggagccctggtgatggaagtggaccatgaccggcaggtggtgcatgtggagacactggggctcactctgcaggagcccgaaacactgctggccgccatgcggcccagcgaggagcatgtggccagtcgcctcacctctcctatcgtctccacccacctgggacactcggtaatgtggccttttagaggaacaaatgtggtatctggggctggcggtctgagaagatggaaactgttagcggctacgaaggccaaggtgtacagtgccaccaaacgtggagctggtgacacgcacacgcacggagcacctctctgatcaggacaagtcgaggagcaaagcggaggaaagactccattccagtccttcctggggatggcgcanagcattcctcccacaccggggcccccgtgcagcaggcagccagccccaccaaccccacagccatctcccctgaggagtacttcgaccccaacttcagcctggagtcacggaacattggccgccccatcgagatgtccagcaaagtacagaggttcaaggcaacactgtggctgagtgaagagcacccgctctccctgggtgaccaggtgacccccatcatcgacctaatggccatcagcaacgctcactttgccaagctgcgcgacttcatcactctgcgccttccacctggcttccccgtcaaaattgagattccccttttccacgtgctcaatgcccgcatcaccttcagcaacctgtgtggctgtgatgagcccctgagctccgtgtgggtgccggcccccagctctgctgtcgccgcatcagggaaccctttcccgtgcgaggtggaccccaccgtggtttgaagtgcccaacgggtacagcgtgctgggcatggagcgcaacgagcccctccggggacgaggacgatgacctcctgcagttcgccatccagcagagcctgcttgaagcggagcactgaggcggacaggtgaccgtctgggaagccctgaccaacacccggcccggtgcccgccctcctccccaggccacggtttatgaggaacagcttcagctggagcgggccctccaggaaagcctgcagctgtccacagagcccaggggcccaggatcccctcccaggacacccccagcccccggtccacccagctttgaagagcagctgcgcctggccctggagttgtcttcacgggagcaggaggagcgggagcgncgcgggcagcaggaggaggaggacttacagcggatcctgcagctgtcactcactgagcactgagccatagccccgggagggctggccaggccactccctgcccgcnnnnnnnnnnnnnnnnnnnnnaaactctctgctgctgagcttggggcctggagccccaggaatgagcaggcaggggagactgagatggaaataaagagactgtcgcagca

SEQ ID NO: 744 - DNA, 257 bp; single-stranded, linear
  immediate source library: MMLR2DT01
  immediate source clone: 523661
gaaagcaacggcattatgcttcacatactggaggggcagtgggtgccagtagtgtcctgctggtccttcctgaagaactggatacagagactataaataacaaggttcccccaagaggaatcattgtttctatcatatgtaacatgcaatctgttggcctcaatagcaccgctttgaagattgcccttgaatttgataaagacagatcagactgataaccttaacaccataggtgcaaaatgagttgttctgaggtt

SEQ ID NO: 745 - DNA, 1791 bp; single-stranded, linear
  immediate source library: BRAINOT03
  immediate source clone: 531728
ggcgtggcctccggcggctcctctgctgttgccaagggaaactgccgcgaggaggcggaaggagcagaggaccggcagccggcgtcgaggcggggcgcgggaacgacggcggccatggcggcctcggggcccgggtgtcgcagctggtgcttgtgtcccgaggtgccatccgccaccttcttcactgcgctgctctcgctgctggtttccgggcctcgcctgttcctgctgcagcagcccctggcgccctcgggcctcacgctgaagtccgaggcccttcgcaactggcaagtttacaggctggtaacctacatctttgtctacgagaatcccatctccctgctctgcggcgctatcatcatctggcgctttgctggcaatttcgagagaaccgtgggcaccgtccgccactgcttcttcaccgtgatcttcgccatcttctccgctatcatcttcctgtcattcgaggctgtgtcatcactgtcaaagctgggggaagtggaggatgccagaggtttcaccccagtggcctttgccatgctgggagtcaccaccgtccgttctcggatgaggcgggccctggtgtttggcatggttgtgccctcagtcctggttccgtggctcctgctgggtgcctcgtggctcattccccagacctctttcctcagtaatgtctgcgggctgtccatcgggctggcctatggcctcacctactgctattccatcgacctctcagagcgagtggcgctgaagctcgatcagaccttccccttcagcctgatgaggaggatatccgtgttcaagtacgtctcagggtcttcagccgagaggagggcagcccagagccggaaactgaacccggtgcctggctcctaccccacacagagctgccaccctcacctgtccccaagccaccctgtgtcccagacgcagcacgccagtggtcagaagctggcctcctggccctcctgcacccccgggcacatgcccaccttgcctccgtaccagcctgcctccggcctgtgctatgtgcagaaccactttggtccaaaccccacctcctccagtgtctacccagcttctgcgggcacctccctgggcatccagccccccacgcctgtgaacagccctggcacggtgtattctggggccttgggcacaccaggggctgcaggctccaaggagtcctccagggtccccatgccctgagagaatttctagggaagtcatctcacttggccttctgaaggtcctccctaagagtctcctgacaaaagttacttattgaacacctctatgtgccaggctctgtgttgggtactttgatcaatgcccctgtttcagtctcatctgtactcacggcagccctgtggagtacggtgtactggcccagcttacagatgcagaaagcgagcacgttctgccattcagataaagtcacgtggctctttagtaacacggacaaggctcctcgccaaggaactcgtggcagaagagggcagcagttgggcagtagctgccgatgtctgtccccagctccaccattcctccctgtggctgtgccgtgctcgtggtttcagtgtccgtgtgtccatgtgtctgcccttcaggagctcgcagctggtgtgcttggcggtcccagggcttgtgtagtgtctctcccctgctgcggggcggccccaccccgattcctctccccagaagcggtgggatgggcccccatgaactgcagcagcatgctgaggtgtccatgttgtctgcctttgtataaagaaacagcctctgacctgc

SEQ ID NO: 746 - DNA, 1430 bp; single-stranded, linear
  immediate source library: OVARNOT02
  immediate source clone: 543880
gcatttgagcgngttgactcagcaattaaagcggttgttgactngagtgggaggtattttngtggacgcagtggtaaaagcatgtttctacantttngacaaattcagggtcttggatttggcagancaagtttgattttaagaactagagcacgagtcatctccggtgatccttaaatgaactgcaggctgagaaaagaaggaaaaaggtcacagcctccatggctgttgcataccaagactcttggaaggacttctaagatatatgttgattgatcccttttttattttgtggttttttaatatagtataaaaatccttttaaaaaaacaacaatctgtgtgcctctctggttgtttctcttttttattattactcctgagttgatgacattttttgttagatttcatggtaattctcaagtgcttcaatgatgcagcatttcttgcactnnnnnnnnnnnnnnnnnnnnnnnnngttttgggacatggggttatattaaattattctttgtttttctttttcttttaataaagcctgcaagttactaaattgtagtttcataaattctgtagtaaagtatcatcttggcagtgtgccaaaggtgaaaatgatgctttctctaacagagaaattcttagtgactccagtcgtagaaaaacgtctttacaacctgaataagattgaagaattgtgaacataccatggcctattggatgaatcatttgccgtaggtcacaatcagactgtagggtttgtgatggatttatggagtatgtgggtatagaaatcatgaatctagcatttgttttcagagattcaagcatagtcttaagggtagatcagaaatgacaaatgaattcaaaacctagcaggtgcattgtaaatgtgtgcccagttatgttttggaaatggcagttccttggggtcatgtttctactggcaaaatttgcaatagtgttctattggatgtaattttaaaatttataagattatccacgttggccaagtaaactgtactgccaatagaattctggaattgtgagaaattgtatcattgaagttcagtaggatgtgtggcttaaaaatttatcaggaccacaaaaaagaaaacaaaaatatttggtactgaggttcattgccagggcaggaggtatttccagaaaatactcatgcctgtgttctgttccttgctttcccaaatactgcatgtgactttcctaagcggcagctgaaagactcgagcccgtgctgtctcctttggttattatgacatgaaagtgtatcaagaactcagcatttntttgcatccatggacttggtttggagacataaggaatattctgaccctttttaaaaaaggattttctcatgtttttatttaacataaataaaagagtaacattttacaaaaaacccaaannaaaaaa

SEQ ID NO: 747 - DNA, 1296 bp; single-stranded, linear
  immediate source library: OVARNOT02
  immediate source clone: 543972
tcttggttctcctgaagatttcctctccaaagccttagatcctcctcagctccaagtgatcagcaatgcaatgaatttgctccgaaaaattggagcttgtgaattaaatgagcctaaactgactccgttgggccaacaccttgcagctttacctgtgaatgtcaagattggcaagatgcttatttttggtgccatatttggctgccttgacccagtggcaacactagctgcagttatgacagagaagtctccttttaccacaccaattggtcgaaaagatgaagcagatcttgcaaaatcagctttggccatggcggattcagaccacctgacgatctacaatgcatatctaggatggaagaaagcacgacaagaagggaggttatcgttctgaaatcacatactgccggaggaactttcttaatagaacatcactgttaaccctagaggatgtaaagcaggagttaataaagttggttaaggcagcaggattttcatcttccacaacttctaccagctgggaaggaaacagagcctcacagaccctctcattccaagaaattgcccttcttaaagctgtactggtggctggactgtatgacaatgtggggaagataatctatacaaagtcagtggatgttacagaaaaattggcttgcattgtggagacggcccaaggcaaagcacaagtacacccatcctcagtaaatcgagatttgcaaactcatggatggctcttataccaggagaagataaggtatgccagagtgtatttgagagaaactaccctaataaccccttttccagttttactttttggtggtgatatagaagttcagcaccgagaacgtcttctttctattgatggctggatctattttcaggcccctgtaaagatagctgtcattttcaagcagctgagagttctcattgattcagttttaagaaaaaagcttgaaaatccaaagatgtcccttgaaaatgacaagattctgccagatcattacggaattgataaaaacagaggaataactgaaactgaaattcatggtcaactgctttaaaaattaagatgaagatacagtcatgaaattatctgaaaatgggtcatcacattaagtatttcattacttaaaatgttggtactagccattaacttaaaggtggtgggaaaaaagcacatactttaaacatgtataattttctagttcctttttaatgatggattattctggaatgtatttgccactacatttacaataaattctttggtattatgcnaaaaaaaaagcaaaa

SEQ ID NO: 748 - DNA, 1544 bp; single-stranded, linear
  immediate source library: BEPINOT01
  immediate source clone: 548896
agctggtcagggatgggatggagtgaagggggcagaggcatttggtgtggggttgatcagaggaattttggaaaggcttggaaacattcctatgtatgtgagacacacctatgccagggcaaagactccaagctcaagtttttctcttgccttctagtcacaagaacatggctttggagtgtgacactggcctaggaatccatgactcccaaaggacggggctaggggtagaggaggttcaggcaaagcccttagattttggagacatcaggcagatgtctccaaaaatgattgtgatcaagaatctgaattataagattcacagtctgctccccaacccagtgctgccaactgtacagctgcgcctccacgaaggggcatatgccaggctcgtctgaccctggaatgaggatgtaggaagcaggcagagctccggttcagccctcacaatgggactgaagcaggagagaaggctgggcagaagggctgtggggaagtagggcttgtctccatggatgacgtccagaaggatgtcaggaggaggaatatcacaggagttataggccgtcgtccccgctgcgggtggcggtggtgtgctcgagcaaccagaaccggagcatggaggcgcacaacatcctcagcaaacggggattcagcgtccgatcctttggaacagggactcacgtgaagcttccaggaccagctcccgacaagcccaatgtttatgatttcaaaaccacatatgaccagatgtacaatgatcttcttaggaaagacaaagaactctatacacagaatgggattttacatatgctggacagaaataagagaatcaagccccggccagaaagattccagaactgcaaagacctgtttgatctgatcctcacttgcgaagagagagtgtatgaccaggtggtggaagatctgaattccagagaacaggagacctgccagcccgtgcacgtggtcaatgtggacatccaggacaaccacgaggaggccaccctgggggcgtttctcatctgtgagctctgccagtgtatccagcacacggaagacatggagaacgagatcgacgagctgctgcaggagttcgaggagaagagtggccgcacctttctgcacaccgtctgcttctactgagcccagcgcccgcatgggagccgcctctggagcttcctgttgttcatactttttccttcctgacatttgtttttacttacaggtgttctgctggtgacggtagcattacccaaataaactgtgcatatgaaatgggagaggagatgccaaaacgcccagatgaaagcaatcaagtttcttcttttccacttttacttatgagcaggatattgattacaaagtttttcttctttaaccaaaaaggaaagacaacggtttgtgtgcacttcccgacatacctgtgtcttcgtgtgcctgccttccctccctcctccccaccgggccggactgtacagagccctgctgcggcgtgttaggaatgacctggaattgtcaataaacagatgctgctgtcaaaa

SEQ ID NO: 749 - DNA, 1603 bp; single-stranded, linear
  immediate source library: SCORNOT01
  immediate source clone: 553078
gactgcctattctgaatcagccatcaactcagattgttgccaatgccaaaggcgctgtgactggggcaaannatgctgtgacgactactgtgactggggccaangattctgtggccagcacgatcacaggggtgatggacaagaccaaaggggcagtgactggcagtgtggagaagaccaagtctgtggtcagtggcagcattaacacagtcttggggagtcggatgatgcagctcgtgagcagtggcgtagaaaatgcactcaccaaatcagagctgttggtagaacagtacctccctctcactgaggaagaactagaaaaagaagcaaaaaaagttgaaggatttgatctggttcagaagccaagttattatgttagactgggatccctgtctaccaagcttcactcccgtgcctaccagcaggctctcagcagggttaaagaagctaagcaaaaaagccaacagaccatttctcagctccattctactgttcacctgattgaatttgccaggaagaatgtgtatagtgccaatcagaaaattcaggatgctcaggataagctctacctctcatgggtagagtggaaaaggagcattggatatgatgatactgatgagtcccactgtgctgagcacattgagtcacgtactcttgcaattgcccgcaacctgactcagcagctccagaccacgtgccacaccctcctgtccaacatccaaggtgtaccacagaacatcccaagatcaagccaagcacatgggggtgatggcaggcgacatctactcagtgttccgcaatgctgcctcctttaaagaagtgtctgacagcctcctcacttctagcaaggggcagctgcagaaaatgaaggaatctttagatgacgtgatggattatcttgttaacaacacgcccctcaactggctggtaggtcccttttatcctcagctgactgagtctcagaatgctcaggaccaaggtgcagagatggacaagagcagccaggagacccagcgatctgagcataaaactcattaaacctgcccctatcactagtgcatgctgtggccagacagatgacaccttttgttatgttgaaattaacttgctaggcaaccctaaattgggaagcaagtagctagtataaaggccctcaattgtagttgtttccagctgaattaagagctttaaagtttctggcattagcagatgatttctgttcacctggtaagaaaagaatgataggcttgtcagagcctatagccagaactcagaaaaaattcaaatgcacttatgttctcattctatggccattgtgttgcctctgttactgtttgtattgaataaaaacatcttcatgtgggctggggtagaaactggtgtctgctctggtgtgatctgaaaaggcctcttcactgctttatctcatgatgcttgcttgtaaaacttgattttagtttttcatttctcaaataggaatactacctttgaattcaataaaattcactgcaggatagaccagttacatgctgtttgttccatatgctttgtgtgttgctttcgtagagctgcttaacctgcatgacagagttattatacatac

SEQ ID NO: 750 - DNA, 1286 bp; single-stranded, linear
  immediate source library: SCORNOT01
  immediate source clone: 555803
ggccctagctcgccctctctgggtgggtgggtgagagaggctgcaggggaggctggcaccgggcttgggcctccagtccctgccttgctgactttggccgttgcggtatcacgtgacaatcaactctcccttaacgacgactgcggctgttgggctgcgctgccctccctggcctgcaggtggggccgtggagcccatgcccgccggggttgcaggctcttncgggcctgggctgcagcctggcccggccctgcttccctggcctcccctccttctcctgggtgcttggaagaggtgggtcctggcccgtggttgaggtcttgcctcgtggactggaagcagagggctggctgtgcagcctcctggggtagctcgttttttttgcaccgggtagaatattttttcaggcacggattcctttttttctgggcccccatgggtggtccggcatcctcagggggtgtgagtgtgtgtggggggtctctgagctgaacttgggtggggtggggacttgttcctcgggggccacctttgtgtccttgtcagcggtcgtcctgctgtggcctgggttgcatttcctcttggggggggtattgaggacccccagcctgggaatgagaagggtccccggttccatgtcagacccagaaaggtggatccccccactgttggctgcaggaggtttttggtacccccttttgttccagaaccgtcctgcctctcgcttggggacaggggggctttggatggcactggtgtgcacctgggacccagccccggcctggcaggatccagggatgggtgcctgggatcctggggggagggaggcaggggacgcccttctggagctgggctcggagggtcctgccccatccagccctcggctctctgtgttctctgtccctagcctcaaaccctcttctggcagcgctagtgagatgccttagtctgtgggggtgggtgggggactggggccccgttttcctttgtgagtcttggttggccccagccctggcaggggcctgtctggagcaggggtaggtagggctgtgggttccagaactctataactgggcccctctccagtgtccaggggcttggagagacctgcgcccacccctccactctcccaggagtcgctgatcactgggacctggttccagccgtttgcaggggaggcggctccgagaggcgtgtgctttccgtgggtggcgcccctcccccgccctgcctggcctcatccttgtatttaattaattaaacaagcccctttttaaaccctaaaa

SEQ ID NO: 751 - DNA, 380 bp; single-stranded, linear
  immediate source library: MPHGLPT02
  immediate source clone: 556635
attaccatcaacaatgtgattcaattttattttctatactagctaaaagcaaggaactatattattaacaatcttggctttactgtagtttaaggcaggtgatgatgatgcttattagtccacctgaaagagtccttccaggtttttggaagctttattcctgcttattaccttgcccttgagaagtccttcatggaaagtggaaacactgggttgacttcttttccccatatcctagttgaaagggacagcttatatgtatgttagactgtccaaaagtgtttgtagaacctcattttaaaaaatcaactgtattgtactttttaaaaaatgggatcttaaactctttattaaaaataataaatggaaatgtgttaagc

SEQ ID NO: 752 - DNA, 1532 bp; single-stranded, linear
  immediate source library: MPHGLPT02
  immediate source clone: 557918
caggtaggaaacagcaaatgcagaagctgctgcgcgggagtcggccatggactggaaagaagttcttcgtcggcgcctagcgacgcccaacacctgtccaaacaaaaaaaaaagtgaacaagaattaaaagatgaagaaatggatttatttacaaaatattactccgaatggaaaggaggtagaaaaaacacaaatgaattctataagaccattccccggttttattataggctgcctgctgaagatgaagtcttactacagaaattaagagaggaatcaagagctgtctttctacaaagaaaaagcagagaactgttagataatgaagaattacagaacttatggtttttgctggacaaacaccagacaccacctatgattggagaggaagcgatgatcaattacgaaaactttttgaaggttggtgaaaaggctggagcaaagtgcaagcaatttttcacagcaaaagtctttgctaaactccttcatacagattcatatggaagaatttccatcatgcagttctttaattatgtcatgagaaaagtttggcttcatcaaacaagaataggactcagtttatatgatgtcgctgggcaggggtaccttcgggaatctgatttagaaaactacatattggaacttatccctacgttgccacaattagatggtctggaaaaatctttctactccttttatgtttgtacagcagttaggaagttcttcttctttttagatcctttaagaacaggaaagataaaaattcaagatattttagcatgcagcttcctagatgatttattggagctaagggatgaggaactgtccaaggagagtcaagaaacaaattggttttctgctccttctgccctaagagtttatggccagtacttgaatcttgataaagatcacaatggcatgctcagtaaagaagaactctcacgctatggaacagctaccatgaccaatgtcttcttagaccgtgttttccaggagtgtctcacttatgatggagaaatggactataagacctacttggactttgtccttgcattagaaaacagaaaggaacctgcagctctacaatatattttcaaactgcttgatattgagaacaaaggatacctgaatgtcttttcacttaattatttctttagggccatacaggaactaatgaaaatccatggacaagatcctgtttcatttcaagatgtcaaggatgaaatctttgacatggtaaaaccaaaggatcctttgaaaatctctcttcaggatttaatcaacagtaatcaaggagacacagtaaccaccattctaatcgatttgaatggcttctggacttacgagaacagagaggctcttgttgcaaatgacagtgaaaactctgcagaccttgatgatacatgatctctgaaagactagactgtcttatattatgagatacttgaatgctgcatgtaaagcctttaaagcaaaatcctcagaaatggtctaaataaaacacttgatatgcctagagaacacaaaaaaa

SEQ ID NO: 753 - DNA, 1643 bp; single-stranded, linear
  immediate source library: MPHGLPT02
  immediate source clone: 559785
accccttcttacagatggggacccagagcctgctcttgggaacagccagagtaagattggaacccagacttgcagtccagcgctgtttgcattaaaagggtgggtgagtcaggacccctggctcaggagccgcctctcctaaaagagggtttcaaggccaaatgggtttgtcaacggtgctgtctccctttcttggagatgctcattagcttatcaaagactgagaagtcccgctgttacagaaataatttagtttgctgtattaactgctcctgggcctggagcagtattcccaccttaagatttcccagcatccctgtgctgtcccggctctcattcatgccgaaggcccaacccattggctgtgttctgtttgaagatttggggggcgccttctctttcttccccagggaattctctagcagagggaggggacccaccccagtgaggaagtagattgctgcctctagccagagacctgaactggggaatttgaacattcctttacattgttggagaaatgaagccaaagttattcagatggttttcccaggctaaaggaaagtcacctgcaagagatcccggcactgatctggagcagctgacagggtgggtctcccttaccaaagagaagaaccactctctggcgctggggtgacctgctggctgggcctgtaaggtttccatgttgctgaggccatggagattcccagagctggtcacaccgaccgctctcagggcccgctgccctgggctggcaacaccattctggccttggcctgcagaagctttcagagtcttcactggcagtagggggagatggggagaggaatgatctctgcccagccccttcctttccaaaccatgcaatggaagagcccagatgggtgaagattgattttgccttaactcaagagaattcctgttctccttgtgctatgatttggacacaagattctggatacctggaacttagctgtgtactcctgtaccctaaacagtggatttgagttccagcgtttattcttttttccttttttcagatcaccatctaagttacatctttagctcaggtccatccttctcaagatctccttcttagccccccagcccctggtgctgtctgtggtcaggtgaccttactcaggagcagatatctccttggccgccatggagcctcatccatccacacgtgcctgtagcattccagagctcactgcccttctagatgtgccttcccgcttggcttccagcggcttgtgctcactctgtctgccaggtatgagaagaacacgtaagaccgccaccacactcaccctccctcaaggccctgtgccataggggtggccacccgacctgcccccagaacttttggatactggaggcagttgcataggtctccctctctgggcaccaggactcagtccagcccaagactactctgggcagctcccatcccagtctggggccatttgcagactcaggaaaggatttctacagtgttctataaaagccaaaagagagagtgggtttgggaagagtgagggtggttggggagaggggaccgatgtgcctcattgtttagtggtgattacaaatatgcttttctggataaagtttggttgtttgctcttgaaaaaaaa

SEQ ID NO: 754 - DNA, 275 bp; single-stranded, linear
  immediate source library: NEUTLPT01
  immediate source clone: 561790
gcagattctaggattattattattctcactttacagatgagggagtgagacttaaaggggtaggtaatttgcccacatcccccaactagcaaatggtagagccaggattggaatttgttcaggctcttaaccattgcactctttcaaaatgttaaaaataatgttgtgtctcattttaaaaaattaaataaaaactctttggaccaagcatcagttatgggaatgaatttcantccttgtctcttttgacaacaaatatcaagncantctttccc

SEQ ID NO: 755 - DNA, 1523 bp; single-stranded, linear
  immediate source library: NEUTLPT01
  immediate source clone: 561825
tgccccaacagtgattccctttcaaagagctgtgcttcctaaacattctggggggttttgccagagtcttccccttgctcatcctcatttccaggncactgtcattttagtggtctgagtcaagtcccgtatacattcaagaacagggcataggcgtggaaggtctggaaagttgggtctttttcccttacattgggtgacttgattggccccctctnnnnnnnnnnnnnnnnnnnnnnnnnnnnnnnnnnnnnnnnnngggaaatgtttctccatgtggaatggaagacagcatggcccacaacgtgggccgagtcctcagagaaatactggaaatcattggtgtggttctggttgttttgttgttttgctgccacgttgttgggctaaggtgccttcaccccaagctgttagtgttccagggcacgcttgtgatttttggcaagtatatgcaaatgagcctcctctcctgccctgagacaagtatctgcagtgtgaacctggcagcctcagacccaaggggctcagaggaaacttctctggtttctagagctctgtgctccttcagagaagtcttccttccttccagtcagtgtccctgtgaagctgggatactcatttcctgtgtaccgggcaaacaccggattgctgattttgagaaatgcctctcgatggacctgtaacctgctggagtctgggatggtagctgtgggctggacttggctgatgggatgacccggtggctagtgcagcatcacacaagcctggttcaagtcttggctgtgtcatttcctgctgagggaccaggcactgaatttcctacctcttagggtcattacctatgaggttaaagctacctcatgggattgttatacgncactaatgttgaggcagacacctcttggcagggtgactgctcatcttagaccctccccttttctgcgaatttgggccccttgatcctctgatgggagctgaaaggatgagaggtgggcatctagatttagggaggctgttcaggctttgcaggtcccttacctgaacacatagaaaccctggagctgtgactttttccatgcgtntntntttgnctgtgtgtgttgcgggggatgggcaactgcatgaatgtggtagagaaaatggctctgctcaagagggaaagatacgcatagcaaggcagggaccagaggaatcacaggcgcctggagagcagccgggcaccgcctccaggggacctgccggcttccctcagtcctccaggggcccagcactcttcctttaggccctgtgagcgtcccttgtcaggatacattctctcattttgctgaagctgatttgattgggtgtctgtttctcgcagccaaaagagctctgaatgaggaaagtgcttctgtgctaactccccgcgtctcctgaatttcagtcattcatgtacccgcctcgaaatttttgcaatatctgtgtaccaactgtccatttacttaataaagaagttttctttaaattaaaaaaanaaaaaaaaa

SEQ ID NO: 756 - DNA, 1668 bp; single-stranded, linear
  immediate source library: NEUTLPT01
  immediate source clone: 562315
aaataacgattgaaataaagaatgataccctttcagaagccatcagtatacgaaactttctggtcactctcaatcagccccaggcccgccaggaggagcaggtccgagtagtgcgccagtttcacttccacggctggcctgagatcgggattcccgccgagggcaaaggcatgattgacctcatcgcagccgtnnnnnnnnnnnnnnnnnnnacaggcaaccaccccatcaccgtgcactgcagtgccggagctgggcgaacaggtacattcatagccctcagcaacattttggagcgagtaaaagccgagggacttttagatgtatttcaagctgtgaagagtttacgacttcagagaccacatatggtgcaaaccctgggaacagtatgaattctgctacaaagtggtacaagattttattgatatattttctgattatgctaatttcaaatgaagattcctgccttaaaatattttttaatttaatggaacaaaggagaagccactttccccaggacgcaggactctcccctccactgtccgggacagcgttcgccctttagcggggaggtcattacagcctcatggcctctaccgagagttcgaagtcaaagccgaggggcacaggctttggttcatgtctaggagccctctgtcagaatccttgaagccctttaatggtctaactggcatctcttgtatcaagaagtacctttaaggtagaccttttcagggtgccctcaggaaagggccctgctcatgttttttttcctgtccccttagaccaaccccaggtgtccactgcaggggttctgcctgttcccaaactttttccattccaggaacaaaggagaagccactttccccaggacgcaggactctcccctccactgtccgggacagcgtttcgccctttagcggggaggtcattacagcctcatggcctctaccaaggccccagatcacaggatctcctgggccttggagcacctcacgctgggggaatcaatccctgagggactcaggaatcttctccgtgcaacctgggaaagttcatctcttgtttccttcagtcaaagaaagtccattgtacataacaaaacagcccccaaacagcccagtgccgacaccattgttcctttcacactttcctttgttgcatgcagttgggttcaaatgccaaatagtgattagaagacgaccattctgatctgtgtgtgatctggtcactatgtgactgcctttacggtttctctccatgtgctatatgaatgaagaatgcataccagtgttttaaaaggtatttttatgtgtttttaaacacttttttaaatgagcctgacacctgtgtttcagcatttggagacatccccatgttattcttttaagtgtataattactgatacnnnnnnnnnnnnnnnnnnaactaagttgtgtttaacttatgtgcagtctttataatgtatgtatgttattacagtttcaactatcatattttctttgattacatttataatttgatcttgctctgattataatgccagtgaatgttgctgaactttttgtatatgcaaattgcaagatttaaaccattctgatgcaaggataaacctttactttgactaccanaaannnaananaaanannaaagaannnaagaggcaaa

SEQ ID NO: 757 - DNA, 224 bp; single-stranded, linear
  immediate source library: NEUTLPT01
  immediate source clone: 562700
gtgaccctntgacaaaggagttttaggtacaatccttctcttttcccgggcccagantttttccagggcaaacagaaagccagagtcccattaaggggtcaagaagctttttaccataatttcccagtttccatngggtnnaagaagacctttcttaaangaaagtgggggaattggangtggntgcttntntgntggantnaaacggtttntaatgaggttat

SEQ ID NO: 758 - DNA, 2634 bp; single-stranded, linear
  immediate source library: MMLR3DT01
  immediate source clone: 566890
ctctgccctgctccaggcaccaggctctttccccttcagtgtctcagaggaggggacggacagcaccatggacccccgcttgtccactgtccgccagacctgctgctgcttcaatgtccgcatcgcaaccaccgccctggccatctaccatgtgatcatgagcgtcttgttgttcatcgagcactcagtagaggtggcccatggcaaggcgtcctgcaagctctcccagatgggcctacctcaggatcgctgacctgatctccagctttcctgctcatcaccatgctcttcatcatcagcctgagcctactgatcggcgtagtcaagaaccgggagaagtacctgctgcccttcctgtccctgcaaatcatggactatctcctgtgcctgctcaccctgctgggctcctacattgagctgcccgcctacctcaagttggcctcccggagccgtgctagctcctccaagttccccctgatgacgctgcagctgctggacttctgcctgagcatcctgaccctctgcagctcctacatggaagtgcccacctatctcaacttcaagtccatgaaccacatgaattacctccccagccaggaggatatgcctcataaccagttcatcaagatgatgatcatcttttccatcgccttcatcactgtccttatcttcaaggtctacatgttcaagtgcgtgtggcggtgctacagattgatcaagtgcatgaactcggtggaggagaagagaaactccaagatgctccagaaggtggtcctgccgtcctacgaggaagccctgtctttgccatcgaagaccccagaggggggcccagcaccacccccatactcagaggtgtgaccctcgccaggccccagccccagttgctgggaggggtggagctgcctcataatctgcttttttgctttggtggcccctgtggcctgggtgggcccttccggccttcntggaaggacaatctgcttgtgtcttcctcggtgggctgnttcttctgcagggcctgtgagctgctnaaaactgggtcaacgtttaggctgagtcanttctngggtctnttcataattcagcccaacaatgnttggtttatttcaatcagctttgacaattgtttctgtggcctggggtggggcctcccgncccttcctnggaggacaatctgcttgtgtctccctngntggnntggttcttctgcagggcctgtggaggtgctnaanaactggggtnaaacgntttagggctgaggtcantcctcggggnctnttcataaattaaggccaaacaatgcttgggttatttcaatcagctctgacaattgtttagacggttggcccatntaaagttggtgagtttgtcaagcaactatcgacttgatcagttcagccaagcaactgacaaatcaaaaacccacttgtcagttcagtaaaataatttggtcaaacaacagtctattgcattgatttataaatagttgtcagttcacatagcaatttaatcaagtaatcattaattagttaccccctatatataaatatatgtaatcaatttcttcaaatagcttgcttacatgataatcaaattagccaacccatgagtcatttagaatagtgataaatagaatacacagaatagtgatgaaattcaatttaaaaaaatcacggttagcctccaaaccattttaatttcaaatgaaccccatccaactgggatgccaactttggcggaatgtaggaccctctgagtggctgtataattgttaattcaaatgaaatttcatttaaaccagttgaccaaactgtacattcaacaaattagctccagggaaataacagttatttcatcataaaaccagtcccttcaaacacacaattgttctgctgaagagttgtcatcaacaatccaatgtctcacctatttcagttgctctgtgggtcagtgtgggctggnatagcaggngggattcccatgaaagggggtcatttttaggtgatgaggctgccagtccattcccagggccaggctgtcgctggccatccattcagtcgattcagtcataggcgaatctgttctgcccgaggcttgtggtcaagcaaaaattcagcccctnaaatcaggcacatctgttcgttggactaaacccacaggttagttcagtcaaagcaggcaacccccttgtgggcactgaccctgccactggggtcatggcggttgtggcagctggggaggtttggccccaacagccctcctgtgcctgcttccctgtgtgtcggggtcctccagggagctgacccagaggtggaggccacggaggcagggtctctggggactgtcggggggtacagagggagaaggctctgcaagagctccctggcaatacccccttgtgtaattgctttgtgtgcgacagggaggaagtttcaataaagcagcaacaagcttcaaaaaaaaaaaataancaaaaatnaanannaaatnatacgaatatncccaatattaagtaaaaaatataaganaaggttatnttaaatagatcttaggnaaaataccagntgatgaaggcatctgatgccttcatgngggnngcccatttnggggncccntanttntggnnggnntttt

SEQ ID NO: 759 - DNA, 781 bp; single-stranded, linear
  immediate source library: MMLR3DT01
  immediate source clone: 567375
agcgtgttatgtcccgggtacactctctggagcggcgtctggaagctcttgctgctgaattttcctccaactggcagaaggaggccatgcggctggaacgtctggagctgcggcaaggggctcctggccagggaggtggtggtggcctgagccacgaggacaccctggcgctgctggaggggctagtgagccgccgtgaagctgccctgaaggaggatttccgcagggaaactgctgctcgcatccaggaagaactgtctgccctgagagcagagcatcagcaagactcagaagacctcttcaagaagatcgtccgggcctcccaggagtccgaggctcgcatccagcagctgaagtcagagtggcaaagcatgacccaggagtccttccaggagagctctgtgaaggagctgaggcggctggaggaccagctggccggcctgcagcaggagctggcggctctggcactgaagcagagctcggtggcggaagaagtgggcctgctgccccagcagatccaggccgtgcgggacgacgtggaatctcagttcccggcctggatcagtcagttccttgcccgaggtggagggggccgcgtggggctccttcagagagaggagatgcaagctcagctgcgagagctggagagcaagatcctcacccatgtggcagagatgcagggcaagtcggccanggaagccgcggcctccctgagcctgacgctgcagaaagaaggtgtgattggagtganagaggnncaggtgcaccacatcgtgaagca

SEQ ID NO: 760 - DNA, 307 bp; single-stranded, linear
  immediate source library: MMLR3DT01
  immediate source clone: 569293
ctctgacctcgaggagccaccaaactgcagactgggtccccagggccagtctctggcagggaaagtggctggtgatgcccagagtccccacagtccccccaaggcccccggatgtgaagatgtgcttggcccgggagccccgtcccactggacgcagtctgtggcgtggcccccacctcactgtttgctccacaacgcaggctagaagcactctggggcctgaaggggccgccctggaagcccaccccaccccacactcctctcccctctccccagcttcctcaagggctacgtcaaccacagcctt

SEQ ID NO: 761 - DNA, 280 bp; single-stranded, linear
  immediate source library: MMLR3DT01
  immediate source clone: 569414
caattttatatagttttaaacatgttctgttcaatctgttacggcttagctttatatataatgacatcttgatgggttttatcctgaaaccttggccttagggctcttagaaaaatcagaaacaatgcaaggggcttcccctgagaatgcccactgaatgtatgatggtttatgatagatgggaaatagttaactttttcctattaatgttaaccagtcaattgtaacattaaattttgcccatgatttttggcatattgcaaaggaaatataatggaac

SEQ ID NO: 762 - DNA, 1590 bp; single-stranded, linear
  immediate source library: MMLR3DT01
  immediate source clone: 569493
tgcaatgcctcaagggagtgagctctcaaccacagatagctgtggcttctcagaagcagctcattgccaaggccaggctgagaggggacctgcttgctgtggtggttgcctagcccagatgagcatttacctaccaccttcccacttggctagctgtcctttggatatgtgctgttaactggggaaggcatctaactagtagcctgctactccatagtatggctcaatagatgacacatcattttgacattatcaataggagaaaagaaaactaacccttcttctgattgtttggagccatagttgtctcagatgttctaattctctttgtatgcttggaaacagcatagatatgttgctgtggttttcagaattttctcttttaatcacaagaagccttttaaaaaatgacttacacatattctcaatgtacagtaaaacagacagaagtgagcttatctgtttgatgctgtggcagggtcccagtcactgggcatatcctccttctccttaaccagctcctcagcagcccctgagtcacctgcacaaggtgcttgggaactgctggttatgagcattcctggttttcttcagccaaataacaggtaatcactgtcaattggatttggtcttcattattttatattctgattttatcagaattattctattttaaaattgttttaaaatttaaaaacatttaattcatgatcatgttcatcagtagatgctattattcataagaactgtgattccagcaaactagggtaattggtgcctttttacagttttgaataaaagcatttacaatttctaaattatcagttttcacagtttcagcactcaacctcatcatacgctgatttaatattgttttacattaaaataggtccttttccctgttgtgccaccattcatttaagttggnctgtttgttcttaaaatgcatttaaagaaaaattacccatattgactttcacacctcatataatcagatctattacaaatatatatcggagtgacggtgcccaggatagatgtaatatttcttacagatgctggcacagaggaaataatataccagctaatctagtcacctaaccttgtggttaggaattgcaattttaagaccagaaaaatttgaagtctgatcagagatttacaactgttcattatagtggtgccttaggcaatctttccaaagtaaattcagggccccattgctacttatgccatatttggacatactttttttttcttcaattttgtaaacttcctggaaagctgtcttcactaagtatcccctagtctctatatatgtggttagtagtcatggaaatgacacataaagtacgccagaagtttgatggaacgtgttagaaactgttttgtgcttttatggatgtcatacttgacaatacatgtgtaagttactaatatatgaattgatgctaaatatatcttacatttgaattccttttggataaagttatttcttgatgtgacagagtagtgtgttttcatttttattctttacatgtgaccaaaacaatagaaaagttaaaaataaaatatagtgttttaggtggc

SEQ ID NO: 763 - DNA, 1107 bp; single-stranded, linear
  immediate source library: MMLR3DT01
  immediate source clone: 569636
gctcttcaccgccggcctcccacccagctctctggtcccggcggtaagatggcggctgccgcggagtgcgatgtggtaatggcggcgaccgagccggagctgctcgacgaccaagaggcgaagagggaagcagagactttcaaggaacaaggaaatgcatactatgccaagaaagattacaatgaagcttataattattatacaaaagcccatagatatgtgtcctaaaaatgctagctattatggtaatcgagcagccaccttgatgatgcttggaaggttccgggaagctcttggagatgcacaacagtcagtgaggttggatgacagttttgtccggggacatctacgagagggcaagtgccacctctctctggggaatgccatggcagcatgtcgcagcttccagagagccctagaactggatcataaaaatgctcaggcacaacaagagttcaagaatgctaatgcagtcatggaatatgagaaaatagcagaaacagattttgagaagcgagattttcggaaggttgttttctgcatggaaccgtgacctagaaatttgcccctgtcctgccatcgcttcaaaatcctcaaggcagaatgtttagcaatgctgggtcgttatccagaagcacagtctgtggctagtgacattctacgaatggattccaccaatgcagatgctctgtatgtacgaggtctttgcctttattacgaagattgtattgagaaggcagttcagtttttcgtacaggctctcaggatggctcctgaccacgagaaggcctgcattgcctgcagaaatgccaaagcactcaaagcaaagaaagaagatgggaataaagcatttaaggaaggaaattacaaactagcatatgaactgtacacagaagccctggggctagaccccacaatataaaaccaantgctaaactctcctgtaatcggggtcggttanttcaagcttaggaaactngctgatgcaatagacgcctgcacaantgcagtgaagcttgatgcccttccctaanagccttcttgagagggctcagtgttcctggcncngncngtatgtaggagcagttcgngctntgaagagtttcc

SEQ ID NO: 764 - DNA, 558 bp; single-stranded, linear
  immediate source library: MMLR3DT01
  immediate source clone: 570733
gacattcttgaaattctaagaagttttatgtgtagaacattttaaaaattcatcagattattaaagggaaaataaatgattaatgataattttggaaggttaatgtgagctagacttaagtaaactttggttcatttgtgttcattgaatgttttggaaatgaccaaaaaatgtaaatggccttcactcaagtttgagtgtttaaagttgaaagatgtgctctactaaaagttatagtaattctaacctcacattgaaatgagacagtattccttgttatacaggctgaatttgaagattagagaggatctaatgtttacttaggtaaaggggcataggttttgtagttaagatgaccagacagctaaaagctgtgatgggaagtatggactgctcctatttatagtctcagaaaatggacctttaggtctctatccgtattggcaattattagaagaaagttacacccttttgaaactacaaaagctgtcttggaatttccccctcttctccctatttatgtccccttagaatattttagggagcctataattattt

SEQ ID NO: 765 - DNA, 2149 bp; single-stranded, linear
  immediate source library: PROSNOT02
  immediate source clone: 585906
caccccgaggccaccgtgccccagtaccatgcggtgaagattcctcgggaagaccgacagcagttcaaggaggagaagacgggcaacatcctgaggaacaactngggcagcccccggcgggagggcccggatgcanaaacccatnctgggntgctnaaggggcattccggagcttggncccgatgggcattcaggggccaaggaancgctaggtttcccatnttcccagcttggctttggcttcccttcattccttttcccagaggattccagggatgtggatggaacaacagccctgtttgcactgagtgggcagccagtcattggcctggagctgatggtcaccaacctgccatcggacccagcccagccccaggctgatggggatgatgcccatgaagcccagctcctggtcatgcttcctgactcactgcactactcaggggtccgggccctgggaccctgcggagaagccactctgcctgtccaatgagaatgcctcccatgttgagtgtgagctggggaaccccatgaagagaggtgcccaggtcaccttctacctcatccttagcacctccgggatcagcattgagaccacggaactggaggtagagctgctgttggccacgatcagtgagcaggagctgcatccagtctctgcacgagcccgtgtcttcattgagctgccactgtccattgcaggaatggccattccccagcaactcttcttctctggtgtggtgaggggcgagagagccatgcagtctgagcgggatgtgggcagcaaggtcaagtatgaggtcacggtttccaaccaaggccagtcgctcagaaccctgggctctgccttcctcaacatcatgtggcctcatgagattgccaatgggaagtggttgctgtacccaatgcaggttgagctggagggcgggcaggggcctgggcagaaagggctttgctctcccaggcccaacatcctccacctggatgtggacagtagggataggaggcggcgggagctggagccacctgagcagcaggagcctggtgagcggcaggagcccagcatgtcctggtggccagtgtcctctgctgagaagaagaaaaacatcaccctggactgcgcccggggcacggccaactgtgtggtgttcagctgcccactctacagctttgaccgcgcggctgtgctgcatgtctggggccgtctctggaacagcacctttctggaggagtactcagctgtgaagtccctggaagtgattgtccgggccaacatcacagtgaagtcctccataaagaacttgatgctccgagatgcctccacagtgatcccagtgatggtatacttggaccccatggctgtggtggcagaaggagtgccctggtgggtcatcctcctggctgtactggctgggctgctggtgctagcactgctggtgctgctcctgtggaagatgggattcttcaaacgggcgaagaccccgaggccaccgtgccccagtaccatgcggtgaagattcctcgggaagaccgacagcagttcaaggaggagaagacgggcaccatcctgaggaacaactggggcagcccccggcgggagggcccggatgcacaccccatcctggctgctgacgggcatcccgagctgggccccgatgggcatccagggccaggcaccgcctaggttcccatgtcccagcctggcctgtggctgccctccatcccttccccagagatggctccttgggatgaagagggtagagtgggctgctggtgtcgcatcaagatttggcaggatcggcttcctcaggggcacagacctctcccacccacaagaactcctcccacccaacttccccttagagtgctgtgagatgagagtgggtaaatcagggacagggccatggggtagggtgagaagggcaggggtgtcctgatgcaaaggtggggagaagggatcctaatcccttcctctcccattcaccctgtgtaacaggaccccaaggacctgcctccccggaagtgccttaacctagaggtcggggaagaagttgtgtcactgactcaggctgtctttctctaagtttcccttctcatctgacctnagtttgctgcnannatcnaagtgnttncgnggtttcnncaatta

SEQ ID NO: 766 - DNA, 355 bp; single-stranded, linear
  immediate source library: UTRSNOT01
  immediate source clone: 589345
gccctgctggggccgtccagtcccccagacctcacaggctcagtcgcggatctgcagtgtcatgcctgggagccctcggcccgcgccaagctgggtgctgttgctgcggctgctggcgttgctgcggcccccggggctgggtgaggcatgcagctgcgccccggcgcaccctcagcagcacatctgccactcggcacttgtgattcgggccaaaatctccagtgagaaggtagttccggccagtgcagaccctgctgacactgaaaaaaatgctccggtatgaaatcaaacagataaagatgttcaaagggnttttnngnaagtcaangggtgttcagtntatctatncggcttt

SEQ ID NO: 767 - DNA, 1442 bp; single-stranded, linear
  immediate source library: BRSTNOT02
  immediate source clone: 598696
gaagggcacaacattgaccagcctgttgcctnagtcacagatttcatatataaatagcctccctaaaggcnaaatacactgaatgtctatttttactaaccattctatttttatagaaatagctgagagtttctaaaccaactctctgctgccttacaagtattaaatattttacttctttccataaagagtagctcaaaatatgcaattaatttaataatttctgaatggatggttttatctggagtaatatgtatatcatctattagaatttacttaatgaaaaactgaagagaacaaaatttgtaacccactagcacttaagtactcctgattcttaacattggtctttaatgaccacaagacaaccaacagctggccacgtacttaaaattttgtccccactgtttaaaaatgttacctgtgtatttccatgcagtgtatatattgagaatgctgtaacttaatggcaataaatggtttaaatatttgttgtggccgggtgtcgtgaggcgggccttcgggctggctcgccgtcggctgccggggggttggcctgggtgtcattggctctgggaagcggcagcagaggcagggaaccactcggggtctggtgtcggcacagccatggcgggcgcgttggtgcggaaagcggcggactatgtccgaagcaaggatttccgggactacctcatgagtacgcacttctggggcccagtagccaactggggtcttcccattgctgccatcaatgatatgaaaaagtctccagagattatcagtgggcggatgacatttgccctctgttgctattctttgacattcatgagattttgcctacaaggtacagcctcggaactggcttctgtttgcatgccacgcaacaaatgaagtaggcccagctcatccagggagggcggcttatcaaacacgagatgactaaaacggcatctgcataacaatggaaaaggaagaacaaggtcttgaagggacagcattgccagctgctgctgagtcacagatttcattataaatagcctccctaaggaaaatacactgaatgctatttttactaaccattctatttttatagaaatagctgagagtttctaaaccaactctctgctgccttacaagtattaaatattttacttctttccataaagagtagctcaaaatatgcaattaatttaataatttctgatgatggttttatctgcagtaatatgtatatcatctattagaatttacttaatgaaaaactgaaggggaccaaaatttgtaaccactagcactttaaggtnctccctgattcttaaccantggcctttaatgnccncaaaggcaacccancagctnggccacggnacttnaaaaantttgtnccccacttggtttanaaattgntaccngtggantttccatggangngntttattttt

SEQ ID NO: 768 - DNA, 2871 bp; single-stranded, linear
  immediate source library: BRSTTUT01
  immediate source clone: 602872
atttttttaaatcatttttatctcagaacttaaacaaaaattagatgtcgtgcacggactgtgtgaaagaagatgctttgcatatttgctgcactgcatcagtatcttactaaaaatgtgaaatgaaaaggactattgtacactgaaatgcctaaatgtatctgnnagcaccaggtgatactccattttaagggnctncccatttgtgccgggttttgcctcttgacactgtcatcagtaattagaaggtgagagtgatgtacaggataatacattttgcagcagcagttttttttcttgttttcttaccatttatttttcagagtttaaagaaatggactcatgcacagaacatatgcatttgaacttgttcatcggntttttaaatcatttatttagactaacaaaatagtgtgtgacgncttgtgaagagtgttgatattgtgacgatagatctataaatngaagaagntattaatgatgtaagatattgtctggtgtcagctgtgttttattgcacacctaaatcctgattataggcttttcatttctccgcaaagcctttattttggcagttaagccaaatgtgttttccagaaagttagttattttctcctctttctttcctttctttcctccctttttcccgtctgaccccaaaacgttattgtccaaacatgactggacagcagcttttgtttcttgaccctgtaatatgacagtctgctaatattgacagaaggtgcagtttttgggttatagtcgtgattttcgctaatcaatcatattagcaggaaaaaaaatgacttgtttctgttgtacttgagtcttaagaaaaagtgcccatagtttagtgacaatttccaaaggctttagtaccacctgtatttcaaaatggggggcccaaactcccggaagaaacaagctctgaacagactacgtgctcagcttagaaagaaaaaagaatctctagctgaccagtttgacttcaagatgtatattgcctttgtattcaaggagaagaagaaaaagtcagcactttttgaagtgtctgaggttataccagtcatgacaaataattatgaagaaaatatcctgaaaggtgtgcgagattccagctattccttggaaagttccctagagcttttacagaaggatgtggtacagctccatgctcctcgatatcagtctatgagaagggatgtaattggctgtactcaggagatggatttcattctttggcctcggaatgatattgaaaaaatcgtctgtctcctgttttctaggtggaaagaatctgatgagccttttaggcctgttcaggccaaatttgagtttcatcatggtgactatgaaaaacagtttctgcatgtactgagccgcaaggacaagactggaatcgttgtcaacaatcctaaaccagtcatggtttctcttcattgaccagaccagcacttgcaagactccaaaaaaaccaaagttacaatcttcaagttatgcagcatctgcctctacctgccacaggaacagctcacccactgggcagttggcaccatagaggatcacctccgtccttatatgccagagtagagtactgaccagcaaaatggagaagatcagagaatgcagcagcagttttttttcttgttttcttaccactttattctttcagagtttaaagaaaaatgggctcatgcacagaacactatgcattttgaaacttgttcatcctggatttttttaaatcatttttatctcagaacttaaacaaaaattagatgtcgtgcacggactgtgtgaaagaagatgctttgcatatttgctgcactgcatcagtatcttactaaaaatgtgaaatgaaaggactattgtacactgaaatgcttaaatgtatctgaaagcacaaggtgatactcatttttatggtcttcccatttgtgctggtttttgcctctttgacatctgtcatcagtatttagagggtgagaagtgaatgtaacaggtataaataacatttttaaaaacaataactttgctataatcacagttgttccagagcactgtcagatacattctaatgaccagaactggtttaaaaaaagaaaatacaaccatgggaaagaaatcttaaatgaaaaacgcatctcattgtaggcatttttgcctcatattttactgggccatgtttgtttcctggtactcatgtatttttttttttccagatctctttccccaagtttgctattgtaagagtattctgctgcgtgtggatgcagttatacacattaaagcagatctggagtctgaagtagctataaagcagctataaaacagaaatacatgcatagctgcagaaaccatgataggtagaggacnnnnnnnnnnnnnnnnnnnnnnnnnnnnnnnnnnnnnnnnnnnnnttacagagaagagatttttattacaaagaaaaaaaattccagtgaattgtgcagaaatgctggtttttacaccatcctaaagaaaaactttacaagggtgttttggagtagaaaaaaggttataaagttggaatcttaaattgtaaaattaaccattgagtgtcaaagttctaaaagcagaactcattttgtgcaatgaacataaggaaagactactgtataggttttttttttttctccttttaaatgaagaaaagctttgcttaagggttgcatacttttattggagtaaatctgaatgatcctactcctttggagtaaaactagtgcttaccagtttccaattgtatttagcttctggttggaatttgaaaaaaaaagaaaaaaagaaaaagaaaacctaaataaaataggtgaaagttccctgactattcaggtgaatacacaaaag

SEQ ID NO: 769 - DNA, 757 bp; single-stranded, linear
  immediate source library: BRSTTUT01
  immediate source clone: 604657
cctacctccagtgtgcacttagggggtgagcgcgggtgtcgaggtctgtgtgtctgcagactgctaacctatgacaattcagggacctcacctgtcggacctatagcttgctgagcaggaaccttgcacttcacacttcttgagtctcgtttcagaaggaaaatcatttgggattcctactgcccctccatctcaatcctcttctcttcaccagtttccaggactcatctgcaacatttgcaatctttttgcactaaaagtgggcaggagtcggcatgtgcccatcagagagacggctcctcagatgctcagctaagcctaagcgcttccaagcctgaaggccccttcagcttctcatgtgaattaccaacccctggattttccttgtgggggtacaagagcaggagtggggcaagagtttgaaaataaagccgcttccttgtgaactaactatattttagccataactgtttgtgatgtacacaatgttaagggatttatatgcagtgggcttttctgggagaaagttattcagctcttgagcaagtttaagtctggctgaatcctgaggccactgtgaatttgctgatgttcttccaactcagttgagtgattttaaggttttccaaatcttctatggctctctttttannnnnnnnnnnnnnnnnnnnnnnnnnnnnnnnnnggnagatcacatgtagatgtacagtgtgtatattaagctgagtttcaaccaactttattactangnccagcc

SEQ ID NO: 770 - DNA, 426 bp; single-stranded, linear
  immediate source library: BRSTTUT01
  immediate source clone: 607227
ccaagatctccaaggattcggtggcatacccactccagcacacagaagcatgaggttcatgactctcctcttcctgacagctctggcaggagccctggtctgtgcctatgatccagaggccgnctctgccccaggatcggggaacccttgccatgaagcatcagcagctcaaaaggaaaatgcaggtgaagacccagggttagccagacaggcaccaaagccaaggaagcagagatccagccttctggaaaaaggcctagacggagcaaaaaaagctgtggggggactcggaaaactaggaaaagatgcagtcgaagatctagaaagcgtgggtaaaggagccgtccatgacgttaaagacgtccttgactcagtactatagctgtaaggagaagctgagaaatgatacccaggagcagcaggctt

SEQ ID NO: 771 - DNA, 320 bp; single-stranded, linear
  immediate source library: PGANNOT01
  immediate source clone: 620417
gctgccgtgaacaacgcccgagccgcccgcttgcttctccaggccggagccgataaagatgcccaggacaacagggagcagacgccgctattcctggcggcgcgggaaggagcggtggaagtagcccagctactgctggggctgggggcagcccgagagctgcgggaccaggctgggctagcgccggcggacgtcgctcaccaacgtaaccactgggatctgctgacgctgctggaaggggctgggccaccagaggcccgtcacaaagccacgccgggccgcgaggtgggcccttcccgcgcgcacggacggtgtcagta

SEQ ID NO: 772 - DNA, 172 bp; single-stranded, linear
  immediate source library: PGANNOT01
  immediate source clone: 622708
gccacgntccggaacgatggagagtnccgcttgaggctgctgcccctnctggcgncgcctgtgtgatgtacctcttttggtaccggccagaggcgcggtcagccggctgcttattgctgtgtgctcaggagagtntgaggtcagagtgaggtaggaagttcattaaggtgag

SEQ ID NO: 773 - DNA, 258 bp; single-stranded, linear
  immediate source library: PGANNOT01
  immediate source clone: 626570
cccacananctggncccttacactcaagtcaagaaagagtcagaagacaaagatgaagcggtgaaggagtntgggaaagaaagtccccacgaagaggcctnatctttcagccacagtgagggcgatttttccgcaaaagtgaaacanctncagaagccaaaaagaccgagctnggtcccctgaaggaggaggagaagctnatgaaagagggcagcgagaaggagaaaccccagccccttgaggccacatttnttntng

SEQ ID NO: 774 - DNA, 1740 bp; single-stranded, linear
  immediate source library: KIDNNOT05
  immediate source clone: 627856
ttttttttcatgtccaaaccatgcacatactatagtccagaatcaaagcacttttgaaaagtggctgcatggccatcctccagggcccaggaagttgcattccaagggcctgtttacatggcagcagaatccatccccggcagtcagcccatagcttgggaccagtctgtgccctcctgcccagtccagtttactcctcttggttcctgaaggtggccaagtcattgtgttcccacaggcttctctaggctgggggcaggtgtggggctgtggaattccaaagcacaaaaggtgcagaggggattggccttcctgtgcctcaactcaccaaccaccctcctgccttccagttctgccaggtgctccatgctggggacaagtaggagactgccagggcccaaagaaatgggtgagcagtagagtcatctcggggcacttggcagtgtcaagcacctgccccttgcctccttgaccacactggggtgggtgggcccccagcacttcagaggcaggagcctttgggctgagcaagcactgaggaggtggatggaagggagcatctggagggggggagcttccttgagcagtgggcccaggcctggccctccacacttcattctctgacctttctctctcctcatttcggtgcatgtcctttctgcagctgcctttcagcacaggtggttccactgggggcagctaacgctgagtgacaaggatgggaagccacaggtgcattttactcaagtcttctctagtcaatgaggggcacccagtgcttctagggcaggctgggtggtggtcccctaggtatcagcctctcttactgtactctccgggaatgttaacctttctattttcagcctgtgccacctgtctaggcaagctggcttccccattggcccctgtgggtccacagcagcgtggctgccccccagggccaccgcttctttcttgatcctctttccttaacagtgacttgggcttgagtctggcaaggaaccttgcttttagcttcaccaccaaggagagaggttgacatgacctccccgcccccttcaccaaggctggggaacagaggggatgtggtgagagccaggttcctctggccctctccagggtgttttccactagtcactactgtcttctccttgtagctaatcaatcaatattcttcccttggctgtgggcagtggagagtgctgctgggtgtacgctgcacctgcccactgagttggggaaagaggataatcagtgagcactgttctgctcagagctcctgatctaccccaccccctaggatcccaggactgggtcaaagctgcatgaaaccaggccctggcagcaacctgggaatggctggaggtgggagagaacctgacttctctttccctctccctcctccaacattactggaactctatcctgttaggatcttctgagcttgtttccctgctgggtgggacagaggacaaaggagaagggagggtctagaagaggcagcccttctttgtcctctggggtaaatgagcttgacctagagtaaatggagagaccaaaagcctctgatttttaatttccataaaatgttagaagtatatatatacatatatatatttctttaaatttttgagtctttgatatgtctaaaaatccattccctctgccctgaagcctgagtgagacacatgaagaaaactgtgtttcatttaaagatgttaattaaatgattgaaacttg

SEQ ID NO: 775 - DNA, 1244 bp; single-stranded, linear
  immediate source library: NEUTGMT01
  immediate source clone: 634343
cttgggcaatgggaatgggagttaatcttcttgtggccaacacacatcatgtcagcctaaatatgacaggaagtggtatttatgcaccaaatggtcccaaagtgtatcattatgaccatgaagacagagttgggaaaacttctcctttcagaggtggattcacatcccctatcctcgcttgcctacccaacagctgttaattggaatgcctacggcaccaccatcaaaccatttccaggtacagaaaaacactttcaggggatttatttccagggatgggttcaacttcacagtaactttttgcaaaatgcaggcaaaccttacagtctgtcaaaaggagctttgctgtcatttaagctacagaatgttacaaaaagaagagaatgaagtatacgttctaggagcttttacaggattacatggccgaaggagaagagagtactggcaggtctgcacaatgctgaagtgcaaaactactaatttgacaacttgtggacggccagtagaaactgcttctacaagatttgaaatgttctccctcagtggcacatttggaacagagtatgtttttcctgaagtgctacttaccgaaattcatctgtcacctggggaaatttgaggtgctgaaagatgggcgttttgtaaacaagaatggatccatctgggcctatactaacagtgtcactctttgggaggtggtacacaaaggactcactttacagctcatgtgggaccagcaattcagcaataacttacctgctaatattcatattattaatgatcatagctttgcaaaatattgtaatgttatagggcgtctctttatcactcagcttctgcatcatatgcttggctgaatggtgtttatcggcttcccaagtttactaagaaactttgaagggctatttcagtagttatagaccagtgagtcctaaatattttttctcatcaataattattttttaagtattatgataatgttgtccatttttttggctactctgaaatgttgcagtgtggaacaatggaaagagcctgggtgtttgggtcagataaatgaagatcaaactccagctccagcctcatttgcttgagactttgtgtgtatgggggacttgtatgtatgggagtgaggagtttcagggccattgcaaacatagctgtgcccttgaagagaatagtaatgatgggaatttagaggtttatgactgaattccctttgacattaaagactatttgaattc

SEQ ID NO: 776 - DNA, 805 bp; single-stranded, linear
  immediate source library: NEUTGMT01
  immediate source clone: 635562
atgctgtcatgttgtgggaagatgaaacagttgttgaatattgcgatgccgaaaagtctaattttactttatgctatgacaaataccctttagagaaatggcaaatcaacctcaacttgttcaggacgtgtacaggctatgcaatacctttggtcaccatcctgatctgcaaccggaaagtctaccaagctgtgcgggcacaataaagccacggaaaacaaggaaaagaagagaatcataaaactacttgtcagcctcacagttacttttgtcttatgctttactccctttcatgtgatgttgctgattcgctgcattttagagcatgctgtgaacttcgaagaccacagcaattctgggaagcgaacttacacaatgtatagaatcacggttgcattaacaagtttaaattgtgttgctgatccaattctgtactgttttgtaaccgaaacagggaaggatatgatatgtggaatatattaaaattctgcactgggaggtgtaatacatcacaaagacaaagaaaacgcatactttctgtgtctacaaaagatactatggaattagaggtccttgagtagaaccaaggatgttttgaagggaagggaagtttaagttatgcattattatatcatcaagattacattttgaaaaggaaatctagcatgtgaggggactaagtgttctcagagtgatgttttaatccagtccaataaaaatatcttaaaactgccattgtacagctccctccctgcgttttattaaatgatgtatattaaacaaagatcaatattttcaaaaaata

SEQ ID NO: 777 - DNA, 365 bp; single-stranded, linear
  immediate source library: BRSTNOT03
  immediate source clone: 637984
gttgttagagaggtcacttactatttcttcctgttacaaatgatctgaggcagttttttcctgggaatccacacgttccatgctttttcagaaatgttaggcctgaagtgcctgtggcatgttgcagcagctattttgccagttagtatacctctttgttgtactttcttgggcttttgctctggtgtattttattgtcagaaagtccagactcaagagtactaaacttttaataataatggattttccttaaaacttcagtctttttgtagtattatatgtaatatattaaaagtgaaaatcactaccgccttgtgctagtgccctcgagaagagttattgctctagaaagttgagttctcatt

SEQ ID NO: 778 - DNA, 531 bp; single-stranded, linear
  immediate source library: BRSTNOT03
  immediate source clone: 640287
tactctaaattattgataacctcttcctccagttgtctcctttaagctttcctgggtctaacctacataggtaatttaagaacatcctcagaaaggacagctgaaggcaataggaggcagattatctctttagggcgtcctcaagtttttttggtctgttctcccacttgattgacctcaccagttgagacacctagtgtatggctcatgcccagccttccacctgggattctccagcctccacccagcagccctgggattgctttctccaattaaggcctttccatcagctctctgctttttcaaagcgaaaaaactaatggattagtgggttatcttttccaaggaacaggtttgcacttcttggaaaaagtgcctaaagtgtgcccattaatatgaggatagatttaggctcataagccttttggtaacactgaaagtagtatcatataggcaagctctccttataagtaaggctttcaatttttaaaacagacatcctgctttaacaatttgtaagatgactgtgcc

SEQ ID NO: 779 - DNA, 273 bp; single-stranded, linear
  immediate source library: BRSTNOT03
  immediate source clone: 640544
ccacgggtncncgtgaatactncaatctattgagtcgcgagcacatttctttcccaaataaaatagtaacgatatgtcctnattggataataaactatgtgatcaacctacttcccactctcaaagatatgattctgtacagncctntggtcagtagatcttctagcaattcatttaatgaattcctttacctgagaggaagantgcagaggcaagggtttgtgccagggtctccagggaataaaggtaaatagcccttccccaaacccaact

SEQ ID NO: 780 - DNA, 526 bp; single-stranded, linear
  immediate source library: BRSTNOT03
  immediate source clone: 642272
gagggggagaatgttcttttggccactgtgaagcctcaggaaggggctcggattgctcaaggacccatgggagagaggaggctttgactgggctgcctgcctgtgaggtctctggactagaggtccaacgcagtccagctgacaaggatggaatacgccatgaagtcccttagccttctctaccccaagtccctctccaggcatgtgtcagtgcgtacctctgtggtgacccagcagctgctgtcggagcccagccccaaggcccccagggcccgtccctgccgcgtaagaacggcggatcgaagcgtgaggaagggcatcatggcttacagtcttgaggacctcctcctcaaggtccgggacactctgatgctggcagacaagcccttcttcctggtgctggaggaagatggcacaactgtagagacagaagagtacttccaagccctggcaggggatacagtgttcatggtcctccagaaggggcagaaatggcagcccccatcagaacaggggacaaggcacc

SEQ ID NO: 781 - DNA, 626 bp; single-stranded, linear
  immediate source library: BRSTTUT02
  immediate source clone: 643784
cttgaagttttcaatgattttttcactttctcttttcaaactggggtactgagccacgatttgttctctcaacacacaggtgtttcttttctctgactcaggattctgagaagctgctgcactggggaccattcttttctcaacctcaacctgaaagtatctgccttctaattcatcaactggctgggtgctttctaaaatggtgtcattgttttcaatgagtttccaatcatcattctccagaaaggaaagaaatctgccatccttgcacagtgcatccttgatggtttctcctttgaaagcataaacacagagtttgcgcccctttttgtgaagcttcccacatttaacaatccttcttttacacttcccaattccaatngcatgaatgtaaaattngacncattcagtcgatgcttngtccngccngccaaatatgtggttatcttccttcngctnacttttactttgggaaaatgtaatgnccacctggccnccttcagggaancaactgaggggcattccaaggtttatgtactctttgatnccttctgtgccacgcacaagcatttcttggccttggtgagtttctatctcttttctgacagcctggagagtgttgagag

SEQ ID NO: 782 - DNA, 2822 bp; single-stranded, linear
  immediate source library: BRAINOT03
  immediate source clone: 660821
tatttactgcangtaggagcacagaaatctgcacagaccttcttatcggagattcgatgggaaaaaaacatcacgttgggagaaccgcctgggtttttgcactcgtggtggtgtgtattttgggacctttactgtgcagctcctgaaaggagagacacttgtgaacattcaagtggagcaaaagcctttcatgattatagtgcagcagctgccccgagccccgtgcttggcaacattccccccaacgatgggatgccgggaggccccatcccgccaggtttctttcagccttttatgtcaccgcgatacgcaggcggccccaggcccccgatcagaatgggaaaccagcctccgggaggagttcctgggacacagccattgctgcccaattctatggatcccacacgacaacaaggccaccccaacatgggaggatcaatgcagagaatgaaccctccccgaggcatggggcccatgggtcccggcccacagaattacggcagcggcatgagaccaccacccaactccctcggccccgccatgcccgggattaacatgggcccgggagctggcagaccctggcccaatcctaacagtgctaactcaattccatactcctcctcatcacctggtacctatgtgggaccccctggtggtggcggtcctccaggaacacccattatgcccagtcccgcagattcaacaaattccagtgacaacatctacacaatgattaatccagtgccgcctggaggcagccggtccaacttcccgatgggtcccggctcggacggtccgatgggcggcatgggtggcatggagccacaccacatgaatggatcattagggtcaggcgacatagacggacttccaaaaaattctcctaacaacataagtggcattagcaatcctccaggcacccctcgagatgacggcgagctaggagggaacttcctccactcctttcagaacgacaattattctccaagcatgacgatgagtgtgtgatccccccttctccgagacgctgagagagcaggcattgcaggcgggaagatgccagaaattatgcaagaagtgaggtgtcattatccaggagctggtggggagggcatctccctgctcccctcaaccccctcccaccccatccacgccccctacctttcccaattttagtttcatgcaataaaaaggccaaactttttattccataaaacaagaaggacaaaactctcaaaaatgtatttcaagtcagtgaccagaaaaatcccaccccttgccctttccccaaaggaccttttctgtacatgacacttttttgttgttttttgtttggggttttaccattgttgggatttttttatttgttttcaggggggttttttgggggaaaatttttttaaatggaagcttctagcaagccccccaccccaatcaacctctatgcnnnnnnnnnnnnnnnnnnnnnnnnnnnnnnnnnnnnnnnnnnnnnnnnnnnnnnnnngccctgctgtctgtctgtgcccaagcccttccaccagaaaagctagtctaggtgtgagagcccacattgtctgtagccatcaaaaatantantaataaactggacagtttacaatcgttggtttctttcaaaaggcctttttttggaaagaagaaaaggcagtcaccgttttccacttggggttttggtttgtgcaacaggcaggggaggagtggggacgcgtttgttctagcttgatttccatggcaacagcagcggcacgcttggaccccagaacccagcaccctccatcctgtggccagaggggccggaccactgacccctttcaggattccaccacagcccagaccgtcaccgtgacccggtggcatgcactgttcccaggacaccttcctcctcctctcctggacctcccttccgtcctggcctccctgcctctccagcccctcctctgcccccaccccagtcttcccagtgagaatcctgccagctgggtggtggcctggcgcagagtgggagaggctgccactgacaggaatggctatgacctggggacatggaaacagtgacctccgcgttctggtcccgagatcctcgcatcagcgtcatcgtgtgcaccggcttggggggctggagttccggttttctttgttttttctctttattcgtcctttctcaaagatgggatactgatcagaattgctctgtatatgcttgggactggatggaaagactttggagcagctgtggggggtggggggacaccgtacaaccaaacagacgtgctggctccagtcctgtttttacatttcaaaaaccaacaagcccgacagtggagcctgtcccctcccgggagggtgctcatggccccactcacctcatcaccccacggaaacctttgtgtcttgccctggaagacacccgaattctttgtacattgacatgcccttctccttcctccctcccctgtagctggtctttgttttactccctccctttctgatccatgtatatcatattatgtgagatatcatctgcctgaaaaaagactttgtgcggattattgggaacattgtagctgtttctgtgttttttcttaccttgtagtctggttctgaattaagagaggaaaaaaaagtaattatgatacattgtagtttgtgtacgatatatgttgataacgttttattaaagggacatcttttttccgcagcccttcctgacatgtttggggaatgtgggttggngtttattacactgnttacagantgcaaggtgactngnggggcacngtttntgttccgggngcataacaagg

SEQ ID NO: 783 - DNA, 428 bp; single-stranded, linear
  immediate source library: BRAINOT03
  immediate source clone: 662097
agtgcctgtaccagccaggtgacgcggctctgtgacctctcagtggaaggggactcagtgacctccgtgggctggtctgagcgggggaacctggtggcggtgggcacacacaagggcttcgtgcagatctgggacgcaaccgcagggaagaagctgtccatgttggaaggccacacggcacgcgtcggggcgctggcctggaatgctgagcagctgtcgtccgggagccgcgaccgcatgatcctgcagagggacatccgcaccccgccactgcagtcggagcggcggctgcagggccaccggcaggaggtgtgcgggctcaagtggtccacagaccaccagctnctcgcctcggggggcaacgacaacaagctgctggtctggaatcactngagcctgagccccgtgcagcagtacacggagcacct

SEQ ID NO: 784 - DNA, 1760 bp; single-stranded, linear
  immediate source library: SCORNOT01
  immediate source clone: 664692
gcgggagtatattctgtgggcagcgtctaaatcccagcttctggcacaccagttcatctggaacatgaagactaacatttatctagatgaagagggccaccagaaagaccctgacatcggcgacctcctgggatcagttggtagaggagatcacaggctccttgtccggcccagcgaaggacttttaccagcgggagtttgatttctttaacaagatcaccaacgtgtcggctatcatcaagccctaccctaaaggcgacgagagaaagaaggcttgtctgtcggccctgtctgaagtgaaggtgcagccgggctgctacctgcccagcaaccctgaggccattgtgctggacatcgactacaagtctgggaccccgatgcagagtgctgcaaaagccccatatctggccaagttcaaggtgaagcgatgtggagttagtgaacttgaaaaagaaggtctgcggtgccgctcagactccgaggatgagtgcagcacgcaggaggccgacggccagaagatctcctggcaggcagccatcttcaaggtgggagacgactgccggcaggacatgctggccctgcagatcatcgacctcttcaagaacatcttccagctggtcggcctggacctctttgtttttccctaccgcgtggtggccactgcccctgggtgtggggtgatcgagtgcatccccgactgcacctcccgggaccagctgggccgccagacagacttcggcatgtacgactacttcacacgccagtacggggatgagtccaccctggccttccagcaggcccgctacaacttcatccgaagcatggccgcctacagcctcctgctgttcctgctgcagatcaaggacagacacaacggcaacattatgctggacaagaagggccatatcatccacatcgactttggcttcatgtttgaaagctcgccgggcggcaatctcggctgggaacccgacatcaagctgacggatgagatggtgatgatcatggggggcaagatggaggccacacccttcaagtggttcatggagatgtgtgtccgaggctacctgggctgtgcggccctacatggacgcggtcgtctccctggtcactctcatgttggacacgggcctgccctgttttcgcggccagacaatcaagctcttgaagcacaggtttagccccaacatgactgagcgcgaggctgcaaatttcatcatgaaggtcatccagagctgcttcctcagcaacaggagccggacctacaacatgatccagtactatcagaatgacatcccctactgaggaggggaccttcgagggcctctgccccatgtgcccttgaagctgccccacaatcatggagccctgcgacctacccgccctgccgccacatgcagtggaggagaggcctgtggcccgaagagcctggtagcgcctcctggggcagcacgtgggtggcgcaggcttagtaacgccgtggnactgcagcgacaatcagtggatggtgctgtctatgcacaggtgtgagtcctctgtttgcactggacatattccctacctgttttatttcataggtacatgaagtattgtgtataaaaaaagagataaggttttaacccaacatcaaccaaaataaaaaccccaaaatagtgctgtgttggaatctgtgaggttttgtgtcaagtcctaagtccaccttnagccaaagggcagttcctggntttgcccctagagaggggggcccagtgttggctgca

SEQ ID NO: 785 - DNA, 262 bp; single-stranded, linear
  immediate source library: SCORNOT01
  immediate source clone: 667680
ggaaaagttgcaaggcaaagctatccgtcagtgtcatgtggtgatgatttcactgtctgtgtgactgatgagggtcagctctatgccttcggatcagattattatggctgcatgggggtggacaaagttgctggccctgaagtgctagaacccatgcagctgaacttnttcctcagcaatccagtggagcaggtctcctgtggagataatcatgtggtggttctgacacgaaacaaggaagtctattcttggggctgtggcg

SEQ ID NO: 786 - DNA, 551 bp; single-stranded, linear
  immediate source library: CRBLNOT01
  immediate source clone: 675530
tcacggtactagtggccccagagaatcctgtggtggaggtccgggagcaggcggtagagggcggcgaggtggagctcagctgcctggttccgnggtcccgtccggctgccaccctgcgctggtaccgggaccgcaaggagctgaaaggagtgagcagcagccaggaaaatggcaaggtctggagcgtggcaagcacagtacggtttcgtgtggaccgtaaggacgacggtggtatcatcatctgtgaggcgcagaaccaggcgctgccctccggacacagcaagcagacgcagtacgtgctggatgtgcagtactcccccacggcccggattcatgcctcccaagctgtggtgagggagggagacacgctggtgttgacgtgtgctgtcacggggaaccccaggccaaaccagatccgctggaaccgcgggaatgagtctttgccggagagggcggaggccgtgggagagacgctnacgntgccgggtctggtatccgcggataacggcacctacacttgcgaggcgtccaataagcacggccatgcgagg

SEQ ID NO: 787 - DNA, 1571 bp; single-stranded, linear
  immediate source library: CRBLNOT01
  immediate source clone: 677833
ctatcttttaattttatacaaatttcaaagttacgtaatacttttatttaaaaagtgaaacaaagcttttcctctcccttacccacatgttagtccagcagaaggggaaagcattggccccaggccaaaatcataaacgctttcaattaactaataataattgctggcatgttgccattaaatatccttgtctcattatctctggttgctttatcaaacccataggtcactgaagcccacttttgagacaaagactatttctcccccaaaagtcaagggaaatataaaaaatgaaattagtgattaagaatagaagtcaattaatacattcattttgtcttaattatttaaagtccagttttttccctccagcaaacctgaaaatacactatcctccagctatcagaattatattgagatctactcacatttatgatgatgttcagagattctcattgggaaggaaaaggcacacgctgcggcggtcttgcatgactctgttgttgtggaaattcaatttgttcattgtgttttgggctctctgggtggtcagggctgggctctgggtccttggcaattcctcaggttcccagcactccaaagccaagctcacctcctcatcacacaccctacaggagaagcattagggtgtccgactacgtgggtttcatagctgtggaaaagccaaaggggagactcctgaagaaaggcggtgaagactgtaaagagcgggtcaggaagatgagcacagcactgctactcctgtgggcacaggggacagcatgtctccagcgcagcggccaaccttgtttaatacatgtgggagactcactggaaattccattctgtattttgcccgcaaagttttaaagctttcatccacagtcaggaattaaacttataccaatgagagcctcacacattcaaggatgtactaagcactacaggcctcacagaaacagagatcccatcttggagttttcagtaccacatgggagataaagggttttgaacatgaaatgacaaaaacaacagcaagaagaaaattcttgtcctttttcattactatcagactcaaataaatgtcttggctcttacattacattcattcttcaaccattgtggtctggcttccacttccttcacttcaccaacatggctctgccaaaggaagcccgtgatctctaggccatcactttaattgatctttctacaacatttatcctggttgttaagccctccttacaacattcttctctctttgtttttatagctccatctctcctgcttctttaacttgataatggcatacttgatttttctatttgttatttcataaaccaattaatacacagataaaatgactgtatatcaaaccatgtttgtatagaaaaaatggattttggatgcctctcatatgtaattagttctattaaacatattaattgtattgtttaatttgtcaggtttttgacagaattttgtttacaagtaataaaaattttatctccaattttcaaaaagnnanaaaananntnganaananannnnannnananaaaanaaagaaa

SEQ ID NO: 788 - DNA, 1418 bp; single-stranded, linear
  immediate source library: UTRSNOT02
  immediate source clone: 681899
tctctctaaaggcgagacctgcgaagggccaggtttcgggcgctgtttctcgttttcatcatatagacaaaacagccctgctgcaaaagatggtcaacgtacctaaaacccgaaggaaccttcttgtaagaagtgtggcaagcatcagcctcacaaagtgacacagtataagaagggcaaggattctttgtatgcccagggaaggaggcgctatgatcggaagcagagtggctatggtgggcagacaaagccaattttccggaagaaggctaagaccacaaagaagattgtgctaaggctggaatgtgttgagcctaactgcagattccaagaggatgcttggccattaagagatgcaagcatttttgaactgggaggagataagaagagaaagggccaagtgatccagttctaaactttgggatatttttcttcaattttgaaggaggaaaatggtgaagccataggaaaagttacccgagggaaaataaatacagtgatattcttaagcaaaaaactcccagttcaaaatgcttgcatcttttaatagccagcattctcttagatctgcagttgggctcaacgnacttaagcaccaaccccataaagtggacacagtacaagaaggggcaaggaattctctgtacggccaggggaagcgggcgttatgccaggaagccagagtggctatggtgggcaaactaagccgattttccggaaaaaggctaaaactacaaagaagcattgtgctaaggcttgagtgcgttgagcccaactgcagatctaagagaatgctggctattaaaagatgcaagcattttgaactgggaggagataagaagagaaaggtatataattatgggtggaaggtgcaatctttttcatagctttattatttgaaaaggtgaacatctattcattgtggcatagagctcaggggtaatcctctaaaaatattagatctatagctaaagatatgtgaggtcttttgctacaaggaggaaaggaagaatgaggcacttaacagcatggtgagtattttaggaacagataatgttcttaatggggcagtagttcatggcaaaatacaaaacaacttttttctgttctgttacagggccaagtgatccagttctaagtgtcatcttttattatgaagacaataaaatcttgagtttatgttcacttcatttgtttgctgttcatcttttgggagggaataagctagagccatcaatacaattccgcttgtggggaaatttatgcctcttactggtactacttgttttgcattgaagctgactggttgagttcacatcatatgttgcaattttctaatttggcacttcaatcactaggggccttatgaggcagtttgtcattatgcaatggttattggttatcatgtgagtagacac

SEQ ID NO: 789 - DNA, 261 bp; single-stranded, linear
  immediate source library: LUNGTUT02
  immediate source clone: 690282
ctaatattcatattattaatgatcatagctttgcaaaatattgtaatgttatagggcgtctctttatcactcagcttctgcatcatatgcttggctgaatgtgtttatcggcttcccaagtttactaagnaactttgaagggctatttcagtagtatagaccagtgagtcctaaatattttttctcatcaataattattttttaagtattatgataatgttgtccatttttttggctactctgaaatgttgcagtgtggga

SEQ ID NO: 790 - DNA, 647 bp; single-stranded, linear
  immediate source library: LUNGTUT02
  immediate source clone: 692911
ctctcaaagtggcagaggacgacagcagctgtgaggtgaacggccgcctgtatcgggaaggggagaccttccagccccactgcagcatccgctgccgctgcgaggacggcggcttcacctgcgtgccgctgtgcagcgaggatgtgcggctgcccagctgggactgcccccaccccaggagggtcgaggtcctgggcaagtgctgccctgagtgggtgtgcggccaaggagggggactggggaccagccccttccagcccaaggaccccagttttctggccttgtctcttccctgccccctggtgtcccctgcccagaatggagcacggcctggggaccctgctcgaccacctgtgggctgggcatggccacccgggtgtccaaccagaaccgcttctgccgactggagacccagcgccgcctgtgcctgtccaggccctgcccaccctccaggggtcgcagtccacaaaacagtgccttctagagccgggctgggaatggggacacggtgtccaccatccccagctggtggccctgtgcctgggccctgggctgatggaagatggtccgtgcccaggcccttggctgcaggcaacactttagcttgggtccaccatgcagaacaccaatattaacatgctgcctgg

SEQ ID NO: 791 - DNA, 216 bp; single-stranded, linear
  immediate source library: SYNORAT03
  immediate source clone: 693932
cccatgccagctccagtcctagctatcacttgaattattattgttctttagtaaccctttactagccttcaacttttatagtttactttttgattgcttaagtaaaaacattttaatgaacttttaaagaaattatagctttccacccatggatagtttttaaaaaataaagaaaatatacatacaccagagaacagatgnaaaaaaattttaagg

SEQ ID NO: 792 - DNA, 226 bp; single-stranded, linear
  immediate source library: SYNORAT03
  immediate source clone: 696057
agcttggctgaggccggcagggcctatacctccctgcgttggacccgtgcctagctgggtgaagtgccctgtggtttacattgtaggaggcatgagaaagcatccttctctgtttggttttgtttgatcttctctgtgctcaggtcttcaaggggaaatacaggcccaagagtctgagttcagcccagtttgcaaccatagccctggagtcattcaggctgaacta

SEQ ID NO: 793 - DNA, 1211 bp; single-stranded, linear
  immediate source library: SYNORAT03
  immediate source clone: 696087
cagcatcattgtttataatcagaaactctggtccttntgtctggtggcacttagagtcttttgtgccataatgcagcagtatggagggagggttttatggaggaaatggggatagtctttnatgcccncaaattaaattaaaggganaactaaggctngcattgtggggttttttaaaaagggttattaataccttgntaaacnaantntttnttttcangggncttttntagccgggatggcntntaactggncctnttttggaaaggatttcccattttggtatctttcatctgaccatccatatccaatgttctcatttaaacattacccagcatcattgtttataatcagaaactctggtccttctgtctggtaggcacttagagtcttttgtgcccataatgcagcagtatggagggaggattttatggagaaatgggggatagtcttcatgaccacaaataaataaaggaaaactaagctggcattgtgggttttgaaaagggttattatacttcttaacaattcttttttttcagggacttttctagctgtatgactgttacttgaccttctttgaaaagcattcccaaaatgctctattttagatagattaacattaaccaacataattttttttagatcgagtcagcataaatttctaagtcagcctctagtcgtggttcatctctttcacctgcattttatttggtgtttgtctgaagaaaggaaagaggaaagcaaatacgaattgtactatttgtaccaaatctttgggattcattggcaaataatttcagtgtggtgtattattaaatnnnnnnnnnnnnnnnnnnnncctaggttgaaggtctaattgatacgtttgacttatgatgaccattatgcaattttcaaaatggaatttgctttcaaaataaatgaagagcagctgtccttctttcctcttttaagtgttcagctgtggcatgctcagaggttcctgctggattccagctggagcggtgtgatacccttctttttcagctgttcgtgccttcctttcttgtatccaccaaagtggagacaaatacatgatctcaaagatacacagtacctacttaattccagctgatgggagaccaaagaatttgcaagtggatggtttggtatcactgtaaataaaaagagggcctgggaattcttgcgattccatctctactttgaaa

SEQ ID NO: 794 - DNA, 256 bp; single-stranded, linear
  immediate source library: SYNORAT03
  immediate source clone: 696390
aaaacctgtatttaaatgtaaaaatgtaaaaaaaatattaatttatccatggatactaagacaacggaaaggtagcattccccagtattttgtttttaattaacaacttccatttctaaaaattcagcatagggagttgtatttaggcatcccagttccaggagaccaggctcctgaggagaacttccagccaataaagcttgtggtttcttcccaacaaccaaaaagaggaagttgtatttagtgcaatttgaat

SEQ ID NO: 795 - DNA, 2190 bp; single-stranded, linear
  immediate source library: SYNORAT03
  immediate source clone: 696878
gttttcaaagactggctctgctgttaagaagttgtacttaaagcggaggagctaagccacctgccaaaatgtgcaaaggacttgcagctttgccccactcatgcctggaaagggccaaggagattaagatcaagttgggaattctcctccagaagccagactcagttggtgaccttgtcattccgtacaatgagaagccagagaaaccagccaagacccagaaaacctcgctggacgaggccctgcagtggcgtgattccctggacaaactcctgcagaacaactatggacttgccagtttcaaaagtttcctgaagtctgaattcagtgaggaaaaccttgagttctggattgcctgtgaggattacaagaagatcaagtcccctgccaagatggctgagaaggcaaagcaaatttatgaagaattcattcaaacggaggctcctaaagaggtgaatattgaccacttcactaaggacatcacaatgaagaacctggtggaaccttccctgagcagctttgacatggcccagaaaagaatccatgccctgatggaaaaggattctctgcctcgctttgtgcgctctgagttttatcaggagttaatcaagtagtaatttagccaggctatgaaatcatcctgtgagttatttcctccataataaccctgcatttcccattaaatctacatatcttcccacagcagctttgcttcagtgatacccacatgggaaaaatcccaggggatgttgcttactctttttgcccacactgctttggatacttatctactgtccgaaggccttctttccccactcaattcttcctgccctgttattaattaagatatcttcagcttgtagtcagacacaatcagaatcacagaaaaatcctgcctaaggcaaagaaatataagacaagactatgatatcaatgaatgtgggttaagtaatagatttccagctaaattggtctaaaaaagaatattaagtgtggacagacctatttcaaaggagcttaattggatctcacttgttttagttctgatccagggagatcacccctctaattatttctgcaacttggttaataaaagtttataagatttttatgaagcagccactgtatgatattttaagcaaatatgttatttaaaatattgatccttcccttggaccaccttcatgttagttggggtattataaataagagatacaaccatgcaatatattatgtttatacaaaatcaatctgcaacacaattcataaagcatttctcttttataccttcctcactggccccctccacctgcccatagtcaccaaattctgttttaaatcaatgacctaagatcaacaatgaagtattttataaatgtatttatgctgctagactgtgggtcaaatgtttccattttcaaattatttagaattcttatgagtttaaaatttgtaaatttctaaatccaatcatgtaaaatgaaactgttgctccattggagtagtctcccacctaaatatcaagatggctatatgctaaaaagagaaaatatggtcaagtctaaaatggctaattgtcctatgatgctattatcatagactaatgacatttatcttcaaaacaccaaattgtctttagaaaaattaatgtgattacaggtagaggccttctaggtgagacacttttaagggtacactgcattttgcagaaaaaaaaaanaaaaagtaatcttttagcaaccccagtattccttcactatttcgcttcctgcattagcaaattttacttacagtcaaaagtgcagatttatactcctgacgtgtctcattcacagctaaataataggccataggacttttggtaggtttaaacttttaattctgtatttcatgattataagtcttgctagaattttttctaatctttagtagatttgattaaataatgattcacagaatttagtaacagaatcaaactaagccatgtatgagggtaatcgagatgaggatattaactcaaaagaaatagggtgatttttaaaggattaataaaattctgaaatgttaagtagaagattacattgtctagtcttgtatttcctccttctgttgctctctttcattcacacactctcagtttctcatatttgtagctcatttatttggttatttcctaagaaattgaaagtg

SEQ ID NO: 796 - DNA, 2259 bp; single-stranded, linear
  immediate source library: SYNORAT03
  immediate source clone: 697122
tagcaacagagttccctgtcaccatttctttcacaaaccttgtgtctcaatttggctacaaaagtcgggaacatgccctgtgtgccgccgtcatttcccacctgcggttattgaagcatctgcagctccttcctctgagcctgatcctnatgccccaccttcaaatgacagtattgcagaagcaccctaaaccttgacagttgaaatgagatcagtgtatcaaagtaaatctgcaaattccttctaaatttcatgtgcaaataattaacttttcagcaatgccaaatgaaggctaaaattttggccagaacattacaaaagttttaaatcgtagacgtaactccccctgaaataaagttaggtagtaaaatccttaatgaaaccagtggatgtgcttaacgtaaggttagtaaagcatacaaagaatctagtgtgctcagggcttggtacaatgagctgaattagatggccttatgaaactctttctaacctcttacccaacctgtttctccttggttaaaattatacttgaaggcccagaacactcatggcacatttgtttaatattgcttatagttagtttaaggtaattttgcttctacagtattttggaaggtctgaaaacttgcacagggtcatctttgtaattatataaccccaaactaagatgcacaatgtctccttcaggtgatcacacacagtggacgagtatgtgcaaacatggacataatagttcacttacaaatgtgatttgatgttaacactagagaatgatgactgtaggaccatttgagcaagtaaaatagtaaagcacatagtgagtgtatgtccctcttaactggtacattgataatttagtttgggcacataaaaggaatatttatatggcttcccaaatgcagagttaccatcttattcgtgtatttctctgagtatttatatcccgtctccttttttcattcttaaaaataaatgaattttcactgttggcacatatgaggcttaaatataaggaacataacacttgcattctaatttttgcatatattgtaaatgtgtctggtatttacagcaaaatactgtgtatccttttatgggtaaaacaaaagtgaacattgcatgcatgtaatgtgatgaatttgtaatttaggagttctttggggcttctgtgacttgggaaatgcttacattcaggccttaatgttgcattagctagcatgttttccctctgatgtatatagtcaactgttgtataaactaatctttgcttgttttctactctgtgatctttccatatcatatttcattaatgatcagttagtgtcaaggagtcaaaacagattaaaattaatttcatgtgtatatggtggaaatttgtggctagtgtgatttttgtttgtttccttttaagtactgttgatcagttgtgacacttactggttaaacttacgttgctaaagatttctctataataagccacaccattatatttagactatattaagggaccttggttttcttctagatagcagctgtcccaaagaaaatatttcttctttgtctgttaagatttagctattatctgccagttgttaagaggttttggttccaaactcaaccagcaatgttgagagctgaacttaagatagctgttgtactttttgctttccatctgttactgtccttcattcttggctccctactatctataaacagctgctgtgaagaagaaaagttgaataagagttggcttaaattttaaaaaagaaaaagaaaattgaggttttaggattttcatggtaacaagctctgggtataagctaagggctggcaagttcagatactaaaatattatttgatcatatcttggatccttttgaaaaagttaagactatatgaaggtaaattagaaataagtatgaatattaataaaatagcatttatcttatttctctattttatgttgtgacttaacctaattttatttttttaacattttcttatttcttataatatgaatgctgatatttaaaggtagatctatgtggtattctttgtgtttcttaattgtttaactcttaagattatttgtgatctggatttatgtatttgttagatacatacgaattgttaaaatggaatgcaagtttttcaaaagcccaggtctaaatgtaatggttggtttattgttctataaccccagcccatcattttctgtgtaaatcataaacaataaacagaatatactcggtggcaaaa

SEQ ID NO: 797 - DNA, 278 bp; single-stranded, linear
  immediate source library: SYNORAT03
  immediate source clone: 699789
gttttcttatgtgaagaggacagtttgtcccctttttttgaagcaccgatgttgcgttcagagctgtagaatgagataattggcagactttaggtacagcaaattcttacttatctaaagcaataagtcaaaggagtccatcattaaattaaatccatagctgatcacaagccttcattttagccaaaactttctctctaaccaaatcttttaccagacttgctaataaataaccagagagatgtgttaataagtgaagttgccagaaattgtcactg

SEQ ID NO: 798 - DNA, 169 bp; single-stranded, linear
  immediate source library: SYNORAT03
  immediate source clone: 699889
agaaaatctgaaaccaaacangagttatgaattccaggtgaaacccaaaaacccacttggtgaaggcccggtcagcaacacagtggcattcagtatggtcagggacccaggtggtggcatttgagaggtgcttgactgagacttattagcttataggntaggaaatttc

SEQ ID NO: 799 - DNA, 266 bp; single-stranded, linear
  immediate source library: SYNORAT03
  immediate source clone: 700033
gttttgttagatttatttctgagtatttctgagtttgatttctaagcattgctctaataacaaatgctattgttaatagtaattttattttttttaaactactgatttccaattgttcaatgttagtatacagaaatatgattgatatttgtgtattaactttatattctgtgtgtgactgtgctaattcacttttaatttctaggagcttatttgtacattctgtggaattttgtacatattaaatcataaatggaaacagtaaa

SEQ ID NO: 800 - DNA, 89 bp; single-stranded, linear
  immediate source library: SYNORAT03
  immediate source clone: 700172
ggaaatgatggtgctccgggctgtggaagaggaaaagctacgaattggagaagcttgggtatttagatcacttagaagggaagcagtca

SEQ ID NO: 801 - DNA, 256 bp; single-stranded, linear
  immediate source library: SYNORAT03
  immediate source clone: 700949
ggaaactaccttaaacgaaaacttcaggatgcagcagaacaactaaaacagtatgaaataaacgccactcctaaaggctggtcctgccactgggacaggtacgcactcttctccccttttcacctttcacctttgacatctcagacatgatttgtgatcaccaccatctgacgacatgacagcctgtctggagactgagagcagctgcagttagcggtgctgggcaggcaaagcaccgcaagcacaaagtttggcc

SEQ ID NO: 802 - DNA, 3204 bp; single-stranded, linear
  immediate source library: SYNORAT03
  immediate source clone: 702552
gtcgtggagagggaggcattctcattaacagtcaaggcgaaaggtttatggagcgatacgcccctgtcgcgaaggacctggccgtctagagatgtggtgtctcggtccatgactctggagatccgagaaggaagaggctgtggccctgcagaaagatcacgtctacctgcagctgcaccacctacctccagagcagctggccacgcgcctgcctggcatttcagagacagccatgatcttcgctggcgtggacgtcacgaaggagccgatccctgtcctccccaccgtgcattataacatgggcggcattcccaccaactacaaggggcaggtcctgaggcacgtgaatggccaggatcagattgtgcccggcctgtacgcctgtggggaggccgcctgtgcctcggtacatggtgccaaccgcctcggggcaaactcgctcttggacctggttgtctttggtcgggcatgtgccctgagcatcgaagagtcatgcaggcctggagataaagtccctccaattaaaccaaacgctggggaagaatctgtcatgaatcttgacaaattgagatttgctgatggaagcataagaacatcggaactgcgactcagcatgcagaagtcaatgcaaaatcatgctgccgtgttccgtgtgggaagcgtgtttgcaagaaggttgtgggaaaatcagcaagctctatggagacctaaagcacctgaagacgttcgaccggggaatggtctggaacacggacctggtggagaccctggagctgcagaacctgatgctttgtgcgctgcagaccatctacggagcagaggcacggaaggagtcacggggcgcgcatgccaggggaagactacaaggtgcggattgatgagtacgattactccaagcccatccaggggcaacagaagaagccctttgaggagcactggaggaagcacaccctgtcctatgtggacgttggcactgggaaggtcactctggaatatagacccgtgatcgacaaaactttgaacgaggctgactgtgccaccgtcccgaccagccattcgctcctactgatgagacaagatgtggtgatgacagaatcagcttttgtaattatgtataatagctcatgcatgtgtccatgtcataactgtcttcatacgcttctgcactctggggaagaaggagtacattgaagggagattggcacctagtggctgggagcttgccaggaacccagtggccagggagcgtggcacttacctttgtcccttgcttcattcttgtgagatgataaaactgggcacagctcttaaataaaatataaatgaacaaaaaaaagnnccaangcannaggnnggccnncnnnntcncagnagnnnnnnncggcttcaagaagaccaagaaggaaatcaagaaggtagccacgccaaagaaggcatccaagcccaagaaggctgcctccaaagccccaaccaagaaacccaaagccaccccggtcaagaaggccaagaagaagctggctgccacgcccaagaaagccaaaaaacccaagactgtcaaagccaagccggtcaaggcatccaagcccaaaaaggccaaaccagtgaaacccaaagcaaagtccagtgccaagagggccggcaagaagaagtgacaatgaagtcttttcttgcggacactccctcctgtctcctattttctgtaaataattttctccttttttctctcttgatgctcaccaccaccttttccccccttctgttctgactttataagagacaggatttggattcttcagaaattacagaataattcatttttccttaaccagttgtgcaaggacagcaacaaccaatctaatgatgagaatgtacttatattttgttttgctattaacctacttacggggttagggatttgcggggggggcttgtgtgttttgttggcttgtttgccatgaaggtagatgtgggtggggagaagacacaaggcagtttgttctggctagatgagagggaacccaggaattgtgaggttagcaggaatatctttagggtgagtgagttttccttgagttgggcacccgttgtgagagtttcagaacctttggccagcaggagagaggtggtagggagcagccagccggcaaaggaaggaggtggaaaaaaaaccgccaccgggctgacttccacctcccagtggtgagcagtgggggcccaaacccagtttccttctcatttttgttagtttgccctttcggcctccctattttcttagggaaggggagtggggtccaagtgacagctggatgggagaagccatagtttctcccagtcagctaggatgtagccattgggggatctttgtggcttcagcaaaattctcttgttaaaccggagtgaaaacttcaggggaagggtggggagtcagccaagtgcctcagtgtgccctgttgaaacttaggtttttccacgcaatcgatggattgtgtcctaggaagacttttcttttcctctggatttttgttcctcctgtacaagaggtgtctttgcttggtttggtggggctgcggccacttaaaacctcccgatctctttttggagtccttttattataagtagttgtagctgcgggagggggagggggagtgggcgggcagtggatagtaagacttactgcagtcgatttgggatttgctaagtagttttacagagcatgtatctgtgtgcatgtgtgtgttttgtgtatatatacatatctagggctagtacttagtttcacacccgggagctgggagaaaaaacctgtacagttgtctttctcttatttttaataaaatagaaaaatcgcgcacttgcgcgtcccccccccacccccttttttaaacaagtgttacttgtgccgggaaaattttgctgtctttgtaattttaaaactttaaaataaattggaaaagggnnnnnnnnnnnnnnnnnnnnnnnnnnnnnnnnnnnnnnnnnnnnnnnnnnnnnnnnnnnnnnnnnggcacganatacgcttctgcactctggggaagaaggagtacattgaagggagattggcacccagtggccggggagcgtggcactttgtcccttgcttcattcttgtgacaagataaaactgggcacagctcttaaataaaatataaatgaacaaactttcttttatttccaaatccatttaaa

SEQ ID NO: 803 - DNA, 751 bp; single-stranded, linear
  immediate source library: SYNORAT03
  immediate source clone: 702628
agagatcaggttctggacaatgctgcagttcaattctgtgcccgcaaagtctctgctgtttcaggagatgttcgcaaagcactggatgtttgcaggagagctattgaaattgtagagtcagatgtcaaaagccagactattctcaaaccactgtctgaatgtaaatcaccttctgagcctctgattcccaagagggttggtcttattcacatatcccaagtcatctcagaagttgatggtaacaggatgaccttgagccaagaaggagcacaagattccttccctcttcagcagaagatcttggtttgctctttgatgctcttgatcaggcagttgaaaatcaaagaggtcactctggggaagttatatgaagcctacagtaaagtctgtcgcaaacagcaggtggcggctgtggaccagtcagagtgtttgtcactttcagggctcttggaagccaggggcatttaaggnttaangagnaacaaggaaacccgtttnacaaaggtgtttttnangcttgaagnggaangaaatagancatgctctgaaagataaagctttaattgganatatctttgctnctngattgccttanatnctnctcttnacaccccacccgnnagtnttccagctggcntttagngngcttcagtcttcattttngtggctttccancattcggggcctgacaancnantntggcctttttnnccttnnangcccattngnttnntanctnctggttantgta

SEQ ID NO: 804 - DNA, 228 bp; single-stranded, linear
  immediate source library: SYNORAT04
  immediate source clone: 705344
gtgtggccaggccaacccagggacctgaaaccccaaggagcccagagggcaccacggaagctgccacccaggacgggaaggaacagccagagcttccatgtgccatggccatgggcacacccagcaccacggagaggatttccacctctggccaggcaggcaccagctcgcatggctgctgggcatggccattggcgggtctgagtgtgggccgctcctcgctaactg

SEQ ID NO: 805 - DNA, 1001 bp; single-stranded, linear
  immediate source library: SYNORAT04
  immediate source clone: 706613
gtggccctgggggtcccgggcactgtcgcgcttgctgcaggcggcccagccgtgtatttatttttcacctatctccttcctgtcaaggcaggcgtctgcaggncaccnggngggcccanccctctcccagccttgcctggntgagctgtgttcnaggggagccctggacaagccctcataggcagggaggggntttcnnaggccaggcatccgcngccccgtgtcgnatcctgnaanaaaatgngcctctgggccccctttcctccagggcccagtctggctcccgagctcagacacagcccccaggagccgcccaccacggctgtgggaacttccaggcctcagcgcagagccctgcttggggccagcacggtgggcagctgccggccgctggggactgggccctgctcgcatgccgccccgccctccccccacctccacgactatttattgagcgcctgttgtgtgtcacggggctatgagggccgtggggtgtttgggtggattatccacacaggtcccggcccctgcccgggctggagttgccacagcctgtgctcctggtcctcacctggaggggccagcaggctgccgtcccaccacacgtggcctctgcgcccagcacggtgctcgccgacagtggtgtctgaacccttggggacgagggcctgggccgcggtgaggccaccagaggcaggagtggccctgggggtcccgggcactgtcgcgcttgctgcaggcggcccagccgtgtatttatttttcacctatctccttcctgtcaaggcaggccgggctccagggctccccttgcgtggggcatgtaggtgggggaggcgtctgcaggtcacctgggggggcccagccctctcccagccttgcctggctgagctgtgttccaggggagccctggacaagccctcataggcagggagggggtttccgaggccaggcatccgccgccccgtgtcgcatcctggaataaaatgtggctctggcaa

SEQ ID NO: 806 - DNA, 1097 bp; single-stranded, linear
  immediate source library: TONSNOT01
  immediate source clone: 734113
ctcaaatggttacctgctattaaggtctgccatattagagttttgcactattttgctaccaagtttgattcatacatctaaaacattttgtagttacttgtcaaggacttaatttgaaaatcatttgccaggccacatagttatcaatttttttttctatcagctattctgttgtatttctaaaacattttttagatgactttttaaagtatatttagcagtaaccttatgaggttcaaattggtaaatctcttgtaatttagccttcatcgaataataggtaccagtgtattaaaaatgtgtattttttgcagccccttgaaccagagtaggttcagagaaactcccaaagtttgtactttagacacatcaagcttgattggtaacttccctccttttttggggaacatgtttgtgtcctattaacttaattggatagatttttaaatatttcttatttttggcacacggaaagggtagttcgagtacagaactttgatttttggtgtagatgcagagggaatgatggggtaaatttccctaggtttatgtgaatttagggggtgtatgcattttgaaacaatctactaacagatggtgctgaaatctattacctacatgttttctagttgttcagcattatgttaatgaagcctccatataaggagtgtttctctggcacagttggtaagttgactgctaacttcatttaaatgtgttactggatatgcagtatactgaaattattaatcagtttgtgtataggaaaagagaactgggttaaaagcaaattaacttgttctgaaaagaaagtatagattaattttgttttctgtttaaattttatctccttggtaaagatttttttttcctggggcagaaaacttggcatttttaggcgtagataccttaccttacaatgccaaaatgaatttaattcccagtactcaggttttttcctttaacagactctatgtgtatcagggctttctaatgggtttttcctcttcgtttttaaaatgtgagtagcatttgaccaatttccagtgctcttagcaatttacttaaaggacaaccnctacaaaagngatctttta

SEQ ID NO: 807 - DNA, 1857 bp; single-stranded, linear
  immediate source library: TONSNOT01
  immediate source clone: 735376
gaagaccaagaaggtacgaagatggcacattttcacatagctgattttcaaccaaatgaaaaaaacaagtgcatttcagaagcttttggaagagcagcttaattcctctcagtcgggaaatgttttctctgccttctgctttgcttgcaccaaacatttctaaacacttgttctgccatctacatgggaggtgatgaaactcagtggtaactcatgatttatgacattgaaaataaagaggaacattgacctgcagactatggtttgtacaagaaagtttgtttgaatgtgtagaagaggaaaaagcaacaacagcaacaacatgaagatgataccaaaacaaggaccacaaaacaactagccatgatgggagacaggagttttttacatggaaacatggcacttgtgtttttatgtggcaagatctttatccataggcagagtatgaaatttcccacccaggctaagcaaataaagaagtccattgccttatagctatgtcagatcacagaatccttccaagtgctctatcacaagtgtgccttatgggaagtttctgactggaaaatcttgtcattctaacactgaaaagtgcacacgcatgacaaaatgtagacaagatgcctcaaggtattggtagcaagcaagattttgccctttagttttcgaagacacctttctttcattatgcactcgggacaagaaaattaatagagcgttattccacagaaggcctctagccagagatcttgagtgtagtgcaagggactcatttttttgcgaacttgtccctgtgactagtagattccccctttttcctgtgtttaggatttagtagtgcataaagcattaatatccataaacatacctagaagtttgttttgcttttaatttaaaggaagcagtaaccacaaagcttccgctcagggttttttctttcttcaagtctccaagggctcttcagcgtcacaagccagcaactctctttgcattaaaatttcaaagtttaattaatataattaaaagcaacagcaagcagcagcctgtgaagattttgctcatcttttttatgccttttgacattgaatgacctattactgtatgcgcattacttggattttgaggggcactctaccttggttatgattcagtagaggaaaaagaccacctttcttcaatttacaaattaaatcttctggagggtcgctatcacaaaacattgacgatgtatgtattataattttttagaaaaaccaccatcgtgtcacgtcgacgatgccaaattatgttagcgtgagcaggaaacaccgtgggggaggaaggcagcagctgaagaaaaaagctcaaatgatctagtcactttcgatactgtacttcagatgcgaaatggatattcgagtggaaacctgacaaagtgcgcctgctttgatgtgaactggtatagacaatgaccagtggctggggtcagtgggatgtctctctgtgagcacaaaggcttatcaaatgacactaaagataagttcaacaaccatcacattggaagggagaaggcgaacatttcatgtttggcgggcatgtgagtgcacaagatggaaagagcgattggagcatcctgggtataattacccccattgtgctcttaatggaaatttcaaaggacgggagtattctgttggttggtgtccaggtttgtggcactgttccaagaggccttacacacacacacaaatatataattttctatacatatatatcctctagcttgaaaacttttgctcaagtttatttatgtcactggctggctggatcccaaagtcatgtgtccacacattcataaataaaaaatttttacctatg

SEQ ID NO: 808 - DNA, 1275 bp; single-stranded, linear
  immediate source library: TONSNOT01
  immediate source clone: 736812
tcttgatgagcaataatgataaccagagagtgatttcatttacactcatagtagtataaaaagagatacatttccctcttaggcccctgggagaagagcagcttagatttccctactggcaaggtttttaaaaatgaggtaaatgccgtatatgatcaattaccttaattggccaagaaaatgcttcaggtgtctaggggtatcctctgcaacacttgcagaacaaaggtcaataagatccttgcctatgaatacccctcccttttgcgctgttaaatttgcaatgagaagcaaatttacagtaccataactaataaagcagggtacagatataaactactgcatcttttctataaaactgtgattaagaattctacctctcctgtatggctgttactgtactgtactctctgactccttacctaacaatgaatttgttacataatcttctacatgtatgatttgtgccactgatcttaaacctatgattcagtaacttcttaccatataaaaacgataattggctttatttggaaaagaatttaggaatactaaggacaattatttttatagacaaagtaaaaagacagatatttaagaggcataaccacaaaagcaaaacttgtaaacagagtaaaaatctttaatatttctaaagacatcactgtttatctgcttcatatgcttttttttaatttcactattccatttctaaattaaagttatgctaaattgagtaagctgtttatcacttaacagctcattttgtctttttcaatatacaaattttaaaaatactacaatatttaactaaggcccaaccgatttccataatgtagcagttaccgtgttcacctcacactaaggcctagagtttgctctgatatgcatttggatgattaatgttatgctgttctttcatgtgaatgtcaagacatggagggtgtttgtaattttatggtaaaattaatccttcttacacataatggtgtcttaaaattgacaaaaaatgagcacttacaattgtatgtctcctcaaatgaaaattctttatctgaaattttaaaagacattgattccgcatgtaaggatttttcatctgaagtacaataatgcacaatcagtgttgctcaaactgctttatacttataaacagccatatcagtactcacaatacgtngcttatttaagatggctgtttataagtataaagcagtntgagcaacactgattgtgcattataaacagccatcttaaataagcaacgtattgtga

SEQ ID NO: 809 - DNA, 1341 bp; single-stranded, linear
  immediate source library: BRAITUT01
  immediate source clone: 753522
cgcataattcactccccagtacaaaggtgtggtatctgtgcgctttgaagaagatgaagacaggaacttgtgtctaatagcatatccattgaaaggggaccatggaattgtggacattgtagataattcagactgtgaaccaaaaagtaagctcctaaggtggacaacaaacaaaaaacatcatgtcttaggaaacagaaaagaacccctaaggactgggtgcgtcacacgataaaagaggagaaaatgaagagccataagttagaagaagaatttgagtggctaaagaaatctgaagtcttgtactacactgtagagaagaaggggaatataagttcccagcttaaacactataacccttggagcatgaaatgtcaccagcaacagttacagagaatgaaggagaatgcaaagcatcggaaccagtacaaatttatcttactggaaaacctgacttcccgctatgaggtgccttgtgtccttgacctcaagatgggcacacgacaacatggtgatgatgcttcagaggagaaggcagccaaccagatccgaaaatgtcagcagagcacatctgcagtcattggtgtgcgtgtgtgtggcatgcaggtgtaccaagcaggcagtgggcagctcatgttcatgaacaagtaccatggacggaagctatcggtgcagggcttcaaggaggcacttttccagttcttccacaatgggcggtacctgcgccgtgaactcctgggccctgtgctcaagaagctgactgagctcaaggcagtgttggagcgacaggagtcctaccgcttctactcaagctccctgctggtcatttatgatggcaaggagcggcccgaagtggtcctggactcagatgctgaggatttggaggacctgtcagaggaatcagctgatgagtctgctggtgcctatgcctacaaacccatcggcgccagctctgtagatgtgcgcatgatcgactttgcacacaccacctgcaggctgtatggcgaggacaccgtggtgcatgagggccaggatgctggctatatcttcgggctccagagcctgatagacattgtcacagagataagtgaggagagtggggagtgagcttgctagctgctccagtacttgagagcgactctgtgtcccaggcacagctgtgctgcgtcagggaggaagccagtatggccaggtggtggctcctgcagcctggagctgatgtgcagtggcctctgtgagccccagcctgagccagtcccagctgtgcttggagtctttatttattttaactatttcttcaacattccacatttgatgatgatacctctttcttccctgagt

SEQ ID NO: 810 - DNA, 2431 bp; single-stranded, linear
  immediate source library: BRAITUT02
  immediate source clone: 757560
aacaatacccctcagttaaatcgcagcttatcacaaggcactcagttaccgagccacgtcacgccaacaacaggggtaccaacaatgtcacttcacacgcctccatctccaagcaggggtattttgcctatgaatcctaggaatatgatgaaccactcccaggttggtcagggcattggaattcctagcaggacaaatagcatgagcagttcagggttaggtagccccaacagaagctcgccaagcataatatgtatgccaaagcagcagccttctcgacagccttttactgtgaacagtatgtctgggntttggantgaacaggggtcaggcatttggaatgntanctccttatcagtaacattttaatggaacagacggagtgaaaatttgacagggttggacctttcaggtttcccagcattagcagaccgaaacaggggggaaggaggtggtaacccaactccattaataaaccccttggctggaagagctccttatgttggaatggtaacaaaaccagcaaatgaacaatcccaggacttctcaatacacaatgaagattttccagcattaccaggctccagctataaagatccaacatcaagtaatgatgacagtaaatctaatttgaatacatctggcaagacaacttcaagtacagatggacccaaattccctggagataaaagttcaacaacacaaaataataaccagcagaaaaaagggatccaggtgttacctgatggtcgggttactaacattcctcaagggatggtgacggaccaatttggaatgattggcctgttaacatttatcagggcagcagagacagacccaggaatggtaacatcttgcattaggaagtgacttaacaacattaggcctcaatctgaactctcctgaaaatctctaccccaaatttgcgtcaccctgggcatcttcaccttgtcgacctcaagacatagacttccatgttccatctgagtacttaacgaacattcacattagggataagctggctgcaataaaacttggccgatatggtgaagaccttctcttctatctctattacatgaatggaggagacgtattacaacttttagctgcagtggagctttttaaccgtgattggagataccacaaagaagaacgagtatggattaccagggcaccaggcatggagccaacaatgaaaaccaatacctatgagaggggaacatattacttctttgactgtcttaactggaggaaagtagctaaggagttccatctgggaatattgacaaattagaagaagggcctcacctgccatccaccttcaactacaaccctgctcagcaagccttctnnnnnnnnnnnnnnnnnnnnnnnnnnncttcccttttcttggggtatggctgtctcagcacaatactcaacataactgcagaactgatgtggctcaggcaccctggttttaattccttgaggatctggcaattggcttacgcaaaaggtcaccatttgaggtcctgccttactaattatgtgctgcccaacaactaaatttgtaatttgtttttctctagtttgagcagggtctgaattttttcatttatttccttttttgccagcagacagacttgagtctgtaaagacaagcaaatacactgacagaagtttaccatagtttctaaaatgtaaaaaagaaaacccccaaaagactcaagaaaattagaccacaaattttgcattgttcattgtagcactattggtaataaaataacaaatgtttgtgcatttttatgtgaagatccttctcgtatttcatttggaaagatgagcaagaggtctgcttccttcattttacttccccttctgtttttgaaaggcagtttcgccaagcttaatgcaagaatatctgactgtttagaagaaagatattgccacaatctctggatggttttccagggttgtgttattactgagcttcatctttccagaatgagcaaaacactgtccagtctttgttacgattttgtaataaatgtgtacattttttttaaatttttggacatcacatgaataaaggtatgtatgtacgaatgtgtatatattatatatatgacatctattttggaaaatgtttgccctgctgtacctcatttttaggaggtgtgcatggatgcaatatatgaaaatgggacattctggaactgctggtcaggggactttgtcgccctgtgcactaaaagggccagattttcagcagccaaggacatccatacccaagtgaatgtgatgggacttaaaagaagtgaactgagacaattcactctggctgtttgaacagcagcgtttcataggaagagaaaaaaagatcaatcttgtattttctgaccacataaaggcttcttctctttgtaataaagtagaaaagctctcctca

SEQ ID NO: 811 - DNA, 3804 bp; single-stranded, linear
  immediate source library: BRAITUT02
  immediate source clone: 758770
ggagccgagcgggcgctggcaccgaggcctgaccatggacgaggaanacgntgtgntcntgctggggaccggtctcaccgaatgcatcctgtcgggcatcatgtctgtgaacgggaagaaggtgctgcacatggaccggaacccctactacgggggcgagagctcctccatcacacccctggaggagctgtataagcgttttcagttgctggaggggccccctgagtcgatgggccgaggccgagactggaatgttgacctgattcccaaattcctcatggctaacgggcagctggtaaagatgctactgtatacagaggtgactcgctacctggacttcaaggtggtggagggcagctttgtctacaaggggggcaagatctacaaagtgccgtccactgagactgaggccttggcttccaatctgatgggcatgtttgagaaacggcgcttccgcaagttcctggtgtttgtggcaaacttcgatgagaatgaccccaagacctttgagggcgttgacccccagactaccagcatgcgtgacgtctaccggaagtttgatctgggccaggatgtcatcgatttcactggccatgccctggcgctctaccgcactgatgactacctggaccagccctgccttgagaccgtcaaccgcatcaagttgtacagtgagtccctggcccggtatggcaagagcccatatttatacccgctctacggcttgggcgagctgccccagggttttgcaagattgagtgccatctatgggggggacatatatgctgaacaaacctgtggatgacatcatcatggagaacggcaaggtggtgggcgtgaagtctgagggagaggtggcccgctgcaagcagctgatctgtgaccccagctacatcccggaccgtgtgcggaaggctggccaggttatccgcatcatctgtatccttagccaccccatcaagaacaccaacgacgccaactcctgccaaataatcatcccccagaaccaggtcaacaggaagtcagacatctacgtgtgcatgatctcctatgcacacaacgtgggcggcccaggggcaagtacatagctattgccagcactactgtggaagaccacggaccctgaaaaggaggtggagccggctctggagctgttggagcccattgaccagaagtttgtggctatcagtgacttgtatgagcccattgatgatggttgtgagagccaggtgttctgttcctgctcctacgatgccaccacacactttgagacaacctgcaacgacatcaaagacatctacaaacgggatggctggcacggcctttgactttgagaacatgaagcgcaaacagaacgacgtctttggagaagctgagcagtgattgtggccgcccccagcccctgctgcccccagcctgtgtctgttctcctcgagggctccagcatcctctgcatcccccaccatcgttcccatcacccacctcattgatccactggtcaaatccttaaccctagcgatggcttgggagatggggggttggatagcatcctctttcttggcccttccttatcctaggaaaagagggttcctctccttgtgtgtgtctcttccccccacccctaattcttctgctctgtttgggaagacgtggaggaaaaggtgacttctgcccccaccgctcttacccccactgtagtggcctttggagatgcccccacctcccccccaccaactctcgcgtgttggagagaaggggccctcccagcacaaagttgcattcctcccccctaatttattctaatttattaactttgacccaccctttctgagcctgcagccttcccgtgtggcctgagggctgtcgagtgagctgccccagcccctcccagcccttgcccagcctgggggagtggggaaggcttgggcatggccccgttggaggttgatttgctgttttgtttcttgtctttgtgttctgtggtacttgctgagagaaaagaaaagtgagccaagcagaaggaggtgggaaaacggacccaaaccccagtgtgccctgccccatgcctttcctttagtggtgggaaacccttatcttgcaaagtgaatgtgtccccttccccaccctctagtgtatttcacagaaaacaaaacctcccaataaaacggttgaaacctgaaaaggcgggcggggcggctataaagggagggcgcaggcggcgcccggatctcttccgccgccattttaaatccagctccatacaacgctccgccgccgctgctgccgcgacccggactgcggcgccagcacccccctgccgacagctccgtcactatggaggatatgaacgagtacagcaatatagagggaattcgcagagggatcccaagatcaacgcgagcaagaatcagcaggatgacggtaaaatgtttattggaggcttgagctgggatacaagcaaaaaagatctgacagagtacttgtctcgatttggggaagttgtagactgcacaattaaaacagatccagtcactgggagatcaagaggatttggatttgtgcttttcaaagatgctgctagtgttgataaggttttggaactgaaagaacacaaactggatggcaaattgatagatcccaaaagggccaaagctttaaaagggaaagaacctcccaaaaaggtttttgtgggtggattgagcccggatacttctgaagaacaaattaaagaatattttggagcctttggagagattgaaaatattgaacttcccatggatacaaaaacaaatgaaagaagaggattttgttttatcacatatactgattgaagagccagtaaaaaaattgttagaaagcagataccatcaaattggttctggggaagtgtggaaatcaaagttgcacaacccaaagaggtatataggcagcaacagcaacaacaaaaaggtggaagaggtgctgcagctggtggacgaggtggtacgaggggtcgtggccgaggtcagggccaaaactggaaccaaggatttaataactattatgattcaaggatatggaaattacaatagtgcctatggtggtgatcaaaacttatagtggctatgggcggatatgattatactgggtataaactatgggaactatggatatggacagggatatgcagactacagtggccaacagagcacttatggcaaggcatctcgagggggtggcaatcaccaaaacaattaccagccatactaaaggagaacattggagaaaacaggaggagatgttaaagtaacccatcttgcaggacgacattgaagattggtcttctgttgatctaagatgattattttgtaaaagactttctagtgtacaagacaccattgtgtccaactgtatatagctgccaattagttttctttgtttttactttgtcctttgctatctgtgttatgactcaatgtggatttgtttatacacattttatttgtatcatttcatgttaaacctcaaataaatgcttccttatgtgattgcttttctgcgtcaggtactacatagctctgtaaaaaatgtaatttaaaataagccaataattaaggcacagttgattttgtagagtattggtccatacagagaaactgtggtcctttataaatagccagccagcgtcaccctcttctccaatttgtaggtgtattttatgctcttaaggcttcatcttctccctgtaactgagatttctaccacacctttgaacaatgttctttcccttctggttatctgaagactgtcctgaaaggaagacat

SEQ ID NO: 812 - DNA, 2407 bp; single-stranded, linear
  immediate source library: LUNGNOT04
  immediate source clone: 766493
cggtgccctatgccgaggtgacctgaccttcctcccgttgccggcctcgcccagtgatgtggaagccatcgccaagctcatcaccagcttcctggagctgcactgccttgagagccccacagagctgtctcagagcagcgacagtgaggccggtgaccctgcaagccagagctgacagccccactgtgcctgagcccgtgcaccgcccacaggacccatggcacattcccggtgtgcctgagcccgtgcaccgcccacaggacccgtggcacattcccggtgtgcctgagcccgtgcaccgcccacaggacccgtggcacattcccggtgtgcctgagcccgtgcaccgnccacagaacccgtggccttggcttcagttggtgcctncagccgagtgccggttcgcgtctctctgctgcggcgcggggaccgctgtgctctcgacccctcctcctgtagagagtggtgctgccctctcgggatgtacctgcaggtggagacccgcaccagctcccgcctccatctgaagagggctccaggcatccggtcctggtccctgctggttggaatcttgtcgattggcctggctgctgcctactacagcggagatagcctgggctggaagctcttctacgtcacaggctgcctgtttgtggctgtgccagaacttggaggactgggaggaagccatcttcgacaagagcacagggaaggttgttttgaagacgttcagcctctacaagaagctgctgactcttttcagagcctggccacgaccaggtggtggttctgctccatgatgtccgtgatgtgagcgtggaggaggagaaggtccggtacttcgggaaaggctacatggtggtgctccggcttgcgacgggcttctcccaccccctcacgcagagtgcagtcatgggccaccgcagtgatgtggaagccatcgccaagctcatcaccagcttcctggagctgcactgccttgagagccccacagagctgtctcagagcagcgacagtgaggccggtgaccctgcaagccagagctgacagccccactgtgcctgagcccgtgcaccgcccacaggacccatggcacattcccggtgtgcctgagcccgtgcaccgcccacaggacccgtggcacattcccggtgtgcctgagcccgtgcaccgcccacaggacccgtggcacattcccggtgtgcctgagcccgtgcaccgcccacaggacccgtggcacattcccggtgtgcctgagcccgtgcaccgcccacaggacccgtggccttggcttcagttggtgcctccagccgagttggcctattgcctgctcatgctgctgcttgcacactgcatgaaacagcaggccagaccaggacatccagactttctccatcgtgaggcctgggcctgcctttctgcagccggaggtctcgccagccctggactcctgctttgggccacagcaagacctcgggcgagtggagaggcggggccaggccgggcccttgtgggtgctgatgctgcatgttgtccccgacacagcgtcctctccctggtggacatccccagcggtcaggtgcttccccaagggcagtgaggggtgaacatccagggcctacctggctgtgcacgctgcagccacactgtggaagctgcccctccccgaggacccgcctcccttgctgatgccaggatctcggcgcatagaccactctgccccagcggtcgtcacagaaaggtctctctgttcctcacactcagcttcagcataagctgtgaggccagaaaaaaggtcagctcttctagtatcgtgcagtgcttaaaaaccgggagctccnnnnnnnnnnnnnnnnnnnnnnnnnnnnnnnnnnnnnnnnnnnnnnnnnnnnnnnnnnnnnnnnnnnnnnnnnnnnnnnnnnnnnnnnnnnnnnnnnnnnnnnnnnnnnnnnnnnnnnnnnnnnnnnnnnnnnnnnnnnnnnnnctgggagattttctgcagaaattgagttccagcctctctcgaacctgggaagacctggcaggagggggctgggctctcggctacagacttctccccaccccgtaggagctgaacgccaaccatcctgacccgccagtgctcttggtctcctgagtgtacccaggtcctcccaggtgcggtgtgcaccgagcgcgcctggcctgatgccctggcctgtgagctggggactcctgggccctgtgagcccctaggcggcaggcccaggaatggctgggtaggacagggaacacctttgccccacgtctggctgtgacctcggtgaaagccgacaggagagagatgggaccctcctcctcagtagtggctgccagtccctcgttgcaggacagggncatcataaccataaataacccttcacgtgtc

SEQ ID NO: 813 - DNA, 1323 bp; single-stranded, linear
  immediate source library: LUNGNOT04
  immediate source clone: 768545
cgagctcttgagtgagacccaacaagctgcttttcaccaaattgcaatggagcctttcgaaatcaatggtcttcaaggtcacaaggnggccatgggcntgcctggngcccctggcccgccgggaccacctgcngagaagggagccaagggggctatgggacgagatggagcaacaggcccctcgggaccccaaggcccaccgggagtcaagggagaggcgggcctccaaggaccccagggtgctccagggaagcaaggagccactggcaccccaggaccccaaggagagaagggcagcaaaggcgatgggggtctcattggcccaaaaggggaaactggaactaagggagagaaaggagacctgggtctcccaggaagcaaaggggacaggggcatgaaaggagatgcaggggtcatggggcctcctggagcccaggggagtaaaggtncttgggaggccaggcccaccaggtttggctggttttcctggagctaaaggagatcaaggacaacctgggactgcagggtgttccgggccctcctggtgcagtgggacacccaggtgccaagggtgagcctggcagtgctggctcccctgggcgagcaggacttccagggagccccgggagtccaggagccacaggcctgaaaggaaggcaaaggggacacaggacttcaaggacagcaaggaagaaaaggagaatcaggagttccaggccctgcaggtgtgaagggagaacaggggagcccagggctggcaggtcccaagggagcccctggacaagctggccagaagggagaccagggagtgaaaggatcttctggggagcaaggagtaaagggagaaaaaggtgaaagaggtgaaaactcagtgtccgtcaggattgtcggcagtagtaaccgagggccggggctgaagtttactacagtggtacctgggggacaaatttgcgatgacggagtggcaaaattctgatgccattgtcttgtggccgcatgctgggttacctccaaaggaagggccctgtacaaagtgggagctgggcactgggcagatctggctggataatgttcagtgtcggggcaaggagagtaccctgtggagctgcaccaagaatagctggggccatcatgactgcagccacgaggaggacgcaggcgtggagtgcagcgttctgacccggaaaccctttcacttctctgctcccgaggtgtcctcgggctcatatgtgggaaggcagaggatctctgaggagttccctggggacaactgagcagcctctggagaggggccattaataaagctcaacatcattggctgtg

SEQ ID NO: 814 - DNA, 3620 bp; single-stranded, linear
  immediate source library: COLNCRT01
  immediate source clone: 770712
agcgagctgaccctgtgggtggacccctatgaggtgtcctaccgcattggggaggacggctccatctgcgtcttgtacgaggaggccccactggccgcctcctgtgggctcctcacctgcaagaaccaagtgctgctgggccggagcagcccctccaagaactacgtgatggcagtctccagctaggcccttccgcccccgccctgggcgccgccgtgctcatgctgccgtgacaacaggccaccacatacctcaacctggggaactgtatttttaaatgaagagctatttatatatattattttttttttaagaaaggaggaaaagaaaccaaaagttttttttaagaaaaaaaatccttcaagggagctgcttggaagtggcctccccaggtgcctttggagagaactgttgcttgcttgagtctgtgagccagtgtctgcctataggagggggagctgttagggggtagacctagccaaggagaagtgggagacgtttggctagcaccccaggaagatgtgagagggagcaagcaaggttagcaactgtgaacagagaggtcgggatttgccctgggggaggaagagaggccaagttcagagctctctgtctcccccagccagacacctgcatccctggctcctctattactcaggggcattcatgcctggacttaaacaatactatgttatcttttcttttatttttctaatgaggtcctgggcagagagtgaaaaggcctctcctgattcctactgtcctaagctgcttttcttgaaatcatgacttgtttctaattctaccctcaggggcctgtagatgttgctttccagccaggaatctaaagctttgggttttctgagggggggaggagggaactggaggttattggggttaggatggaagggaactctgcacaaaacctttgctttgctagtgctgctttgtgtgtatgtgtggcaaataatttgggggtgatttgcaatgaaattttgggacccaaagagtatccactggggatgttttttggccaaaactcttccttttggaaccacatgaaagtcttgatgctgctgccatgatccctttgagaggtggctcaaaagctacagggaactccaggtcctttattactgccttcttttcaaaagcacaacctctcctctaaccctcccctcccccttcccttctggtcgggtcatagagctaccgtattttctaggacaagagttctcagtcactgtgcaatatgccccctgggtcccaggagggtctggaggaaaactggctatcagaacctcctgatgccctggtgggcttagggaaccatctctcctgctctccttgggatgatggctggctagtcagccttgcatgtattccttggctgaatgggagagtgccccatgttctgcaagactanttggtattcttttagggncgacactaaataaaagccaaaccttnggcaaatttttttcttcctggggctcgagcacctnttgggnangtttctntctntntcagtncaattccaaattntcgtagantttttcaanatananctntttnggnttgagaaaagtggnaggtacanttgggaggaactccctccttnaattagcacaaggtcctggagctcacggccgagaacgagcggctgcagaagaaggtggngcagctgtcgcgcgagctcagcaccctgcggaacttgttcaagcagctgcccgancccctgctcgcctcctccggccactgctagcncggcccccgcgcgcgtccccctgccggccggggctgagactccggggagcgcccgcncccgcgccctcgcccccgcccccggcggcgccggcaaaactttggcactggggcacttggcagcgcggggagcccgtcggtaattttannnnnnnnnnnnnnnnnnnnnnnnnnnnnnnnnnccaaaccaaccgcacatgcagatggggctcccgcccgtggtgttatttaaagaagaaacgtctatgtgtacagatgaatgataaactctctgcttctccctctgcccctctccaggcgccggcgggcgggccggtttcgaagttgatgcaatcggtttaaacatggctgaacgcgtgtgtacacgggactgacgcaacccacgtgtaactgtcagccgggccctgagtaatcgcttaaagatgttcctacgggcttgttgctgttgatgttttgttttgttttgttttttggtctttttttgtattataaaaaataatctatttctatgagaaaagaggcgtctgtatattttgggaatcttttccgtttcaagcattaagaacacttttaataaacttttttttgagaatggttacaaagccttttgggggcagtaaaaaatccaggtcctttattactgccttcttttcaaaagcacaactctcctctaaccctcccctcccccttcccttctggtcgggtcatagagctaccgtattttctaggacaagcagttctcagtcactgtgcaatatgccccctgggtcccagggagggtctttgaggaaaactggctatcagaacctcctgatgccctggtgggcttagggaaccatctctcctgctctccttgggatgatggctggctagtcagccttgcatgtattccttggctgaatgggagagtgccccatgttctgcaagactacttggtattcttgtagggccgacactaaataaaagccaaaccttgggcactgttttttctccctggtgctcagagcacctgtgggaaaggttgctgtctgtctcagtacaatccaaatttgtcgtagacttgtgcaatatatactgttgtgggttggagaaaagtggaaagctacactgggaagaaactcccttccttcaatttctcagtgacattgatgaggggtcctcaaaagacctcgagtttcccaaaccgaatcaccttaagaaggacagggctagggcatttggccaggatggccaccctcctgctgttgccccttagtgaggaatcttcaccccacttcctctacccccaggttctcctccccacagccagtcccctttcctggatttctaaactgctcaattttgactcaaaggtgctatttaccaaacactctccctacccattcctgccagctctgcctccttttcaactctccacattttgtattgccttccccagacctgcttccagtctttattgctttaaagttcactttgggcccacagacccaagagctaattttctggtttgtgggttgaaacaaagctgtgaatcactgcaggctgtgttcttgcatcttgtctgcaaacaggtccctgcctttttagaagcagcctcatggtctcatgcttaatcttgtctctcttctcttctttatgatgttcactttaaaaacaacaaaacccctgagctggactgttgagcaggcctgtctctcctattaagtaaaaataaatagtagtagtatgtttgtaagctattctgacagaaaagacaaaggttactaattgtatgatagtgtttttatatggaagaatgtacagcttatggacaaatgtacacctttttgttactttaataaaaatgtagtaggata

SEQ ID NO: 815 - DNA, 1680 bp; single-stranded, linear
  immediate source library: COLNNOT05
  immediate source clone: 776108
ctagtccgcagaggtgtgggggacacactccataatctctacttttctttttgtgcagctgagtcatggagctttcagccccagcacatggctcctccttaactgcgtctgctcaacctccctcagccctgtgaacagcatccccgcacacagacgcagagcaggactctctctgctgccacttcaccttcctgagagaggaccagcggccagagcctcagtgactgccaccctggaggacagggcacaacaaccgtttctggagagaatgggaggattccagaggggcaaatatggaactatggctgaaggtagatcagaagataacttgtctgcaacaccaccggcattgaggattatcctagtgggcaaaacaggctgcgggaaaagtgccacagggaacagcatccttggccagcccgtgtttgagtccaagctgagggcccagtcagtgaccaggacgtgccaggtgaaaacaggaacatggaacgggaggaaagtcctggtggttgacacgccctccatctttgagtcacaggccgatacccaagagctgtacaagaacatcggggactgctacctgctctctgccccggggccccacgtcctgcttctggtgatccagctggggcgtttcactgctcaggacacagtggccatcaggaaggtgaaagaggtctttgggacaggggccatgagacatgtggtcatcctcttcacccacaaagaggacttagggggccaggccctggatgactatgtagcaaacacggacaactgcagcctgaaagacctggtgcgggagtgtgagagaaggtactgtgccttcaacaactggggctctgtggaggagcagaggcagcagcaggcagagctcctggctgtgattgagaggctggggagggagcgagagggctccttccacagcaatgacctcttcttggatgcccagctgctccaaagaactggagctggggcctgccaggaagactacaggcagtaccaggccaaagtggaatggcaggtggagaagcacaagcaagagctgagggagaacgagagtaactgggcatacaaggcgctcctcagagtcaaacacttgatgcttttgcattatgagatttttgtttttctattgttgtgcagcatactttttttcattatttttctgttcatctttcattacatttaaatctctggaccctggagcacttctaatgtatcaccccatggtagtcattgttctaataatcaccaattcagactcagatcctcgtggtctatggagcatgctgcttgctgtctgtgcagctcccatttccccttcttcctgatagacttggagctgtgtgcctccactccaaggctgcctgcctgctgtaaacactattccactctgtctgccaacaactgcttcaggaatgggcctgagatcccatgcaggtccctgagaagtgagtaaaagtccgcagaggtggggatggaagatctctccttagatagaacctgtcttcctccctggcattgtggggtctgggcgtgacactgggactctcagcagctttgtgctgccaacctgagattganggcagtgcctcaaagcagcacagagagttngggccccctgagccctgagccaccagccctgcagcctgccctatctccgcatttccagttgta

SEQ ID NO: 816 - DNA, 3164 bp; single-stranded, linear
  immediate source library: MYOMNOT01
  immediate source clone: 781552
agcgcatggtgctgtgcagccagcagtggaagctgctgtcccagaaggagaaggacgcctatcacaagaagtgtgatcagaaaaagaaagattacgaggtggagctgctccgtttcctcgagagcctgcctgaggaggagcagcagcgggtcttgggggaagagaagatgctgaacatcaacaagaagcaggccaccagccccgcctccaagaagccagcccaggaagggggcaagggcggctccgagaagcccaagcggcccgtgtcggccatgttcatcttctcggaggagaaacggcggcagctgcaggaggagcggcctgagctctccgagagcgagctgacccgcctgctggcccgaatgtggaacgacctgtctgagaagaagaaggccaagtacaaggcccgagaggcggcgctcaaggctcagtcggagaggaagcccggcggggagcgcgaggaacggggcaagctgcccgagtcccccaaaagagctgaggagatctggcaacagagcgttatcggcgactacctggcccgcttcaagaatgaccgggtgaaggccttgaaagccatggaaatgacctggaataacatggaaaagaaggagaaactgatgtggattaagaaagcagccgaagaccaaaagcgatatgagagagagctgagtgagatgcgggcacctccagctgctacaaattcttccaagaagatgaaattccagggagaacccaagaagcctcccatgaacggttaccagaagttctcccagggagctgctgtccaatggggagctgaaccacctgccgctgaaggagcgcatggtggagatcggcagtcgctggcagcgcatctcccagagccagaaggagcactacaaaaagctggccgaggagcagcaaaagcagtacaaggtgcacctggacctctgggttaagagcctgtctccccaggaccgtgcagcatataaagagtacatctccaataaacgtaagagcatgaccaagctgcgaggcccaaaccccaaatccagccggactactctgcagtccaagtcggagtccgaggaggatgatgaagaggatgaggatgacgaggacgaggatgaagaagaggaagatgatgagaatggggactcctctgaagatggcggcgactcctctgagtccagcagcgaggacgagagcgaggatggggatgagaatgaagaggatgacgaggacgaagacgangacgaggatgacgatgaggatgaagataatgagtccgagggcagcagctccagctcctcctcctcaggggactcctcagactctgactccaactgaggctcagccccaccccagggcagccagggagagcccagggagctcccctccccaactgaccacctttgtttctcccccatgttctgtcccttgcccccctggcctcccccannnnnnnnnnnnnnnnnnnnnnnnnnnnaaatacggtgggggtagggggctggaggagcccaggccaggactctgcagcctcagagacatcagccccttgggggtcctcctccagggacagcaactatcagactaagccagcaccggaccagcctggcccaccccacccacttctgcacttgcggttccggcatggacaatggaccggagagtgggggtggggggtcccaaagagtttgatgaggccctccacacctgcggcccaatccaaggtggggtggaagcttggggaagacccattccttcccagaggggcctgccacctggacccctgcattggaactggaggcagggaacatggggaggaggagggtcggtgccttcaagaaaacaggcactgccctggtggccctntnccctgcccacaagttccaatttcttttcaagtcaattgaactgaaatctccttgttgctttgaaaatcttagaagagagcccactaattcaaggactcttaccgtgggagcaactgctggttctatcacaatgaaacggctggtttgtgtgctcttggtgtgctcctctgcagtggcacagttgcataaagatcctaccctgggatcaccactggcatctctggaagaaaacctatggcaaacaatacaaggaaaagaatgaagaagcagtacgacgtctcatctgggaaaagaatctaaagtttgtgatgcttcacaacctggagcattcaatgggaatgcactcatacgatctgggcatgaaccacctgggagacatgaccagtggaaggaagtgatgtctttgatgagttccctgagagttcccagccagtggcagagaaatatcacatataagtcaaaccctaatcggatattgcctgattctgtggactggagagagaaagggtgtgttactgaagtgaaatatcaaggttcttgtggtgcttgctgggctttcagtgctgtgggggccctggaagcacagctgaagctgaaaacaggaaagctggtgtctctcagtgcccagaacctggtggattgctcaactgaaaaatatggaaacaaaggctgcaatggtggcttcatgacaacggctttccagtacatcattgataacaagggcatcgactcagacgcttcctatccctacaaagccatggatcagaaatgtcaatatgaactcaaaatatcgtgctgccacatgttcaaagtacactgaacttccttatgggcagagaagatgtcctgaaagaagctgtggccaataaaggcccagtgtctgttggtgtagatgcgcgtcatccttctttcttcctctacagaagtggtgtctactatgaaccatcctgtactcagaatgtgaatcatggtgtacttgtggttggctatggtgatcttaatgggaaagaatactggcttgtgaaaaacagctggggccacaactttggtgaagaaggatatattcggatggcaagaaataaaggaaatcattgtgggattgctagctttccctcttacccagaaatctagaggatctctcctttttataacaaatcaagaaatatgaagcactttctcttaacttaatttttcctgctgtatccagaagaaataattgtgtcatgattaatgtgtatttactgtactaattagaaaatatagtttgaggccggncacggtggctcacgctgtantccnagtactggg

SEQ ID NO: 817 - DNA, 1367 bp; single-stranded, linear
  immediate source library: OVARNOT03
  immediate source clone: 797908
ccatgcggaagctcttcgtgtggtgaagatcttacagaaccttgatccgccatttagcattgatgggaagatggtagctgtaaacctggccactggaaaacgaagaaatgattctggggaccattctgaccacatgcattactatcagggtaaaaaatatttccgagataggaggggaggtggcagaaattcagactggtcttcagatacaaatcgacaaggacaacagtcatcatctgactgctacatatatgattctgctactggctactattatgaccccttggcaggaacttattatgaccccaatacccagcaagaagtctatgtgccccaggatcctggattaccctgaggaagaagagatcaaggaaaaaaaacccaccagtcaaggaaagtcaagtagcaagaaggaaatgtctaaaagagatggcaaggagaaaaaagacagaggagtgacgaggtttcaggaaaatgccagtgaagggaaggcccctgcagaagacgtctttaagaagcccctgcctcctactgtgaagaaggaagagagtccccctccacctaaagtggtaaacccactgatcggcctcttgggtgaatatggaggagacagtgactatgaggaggaagaagaggaggaacagacccctcccccacagccccgcacagcacagccccagaagcgagaggagcaaaccaagaaggagaatgaagaagacaaactcactgactggaaataaactggcttgtctgctttgcagaaggcagtttcccaataaagaagttctgatcaaacaccagcagctgtcagacctgcacaagcaaaacctgggaaatccaccggaagataaaacagtctgagcaggagctagcctatctggaaaggagagaacgagagggaaagtttaaaggaagaggaaatgatcgcagggaaaagctccagtcttttgactctccagaaaggaaacggattaagtactccagggaaactgacagtgatcgtaaacttgttgataaagaagatatcgacactagcagcaaaggaggctgtgtccaacaggctactggctggaggaaagggacaggcctgggatatggccatcctggattggcttcatcagaggaggctgaaggccggatgaggggccccagtgttggagcctcaggaagaaccagcaaaagacagtccaacgagacttaccgagatgctgttcgaagagtcatgtttgctcgatataaagaactcgattaagaaaggagacaagttccatgggatacaacctccctcttgttttgtttgtctctccttttcttttgttactgttcttgctgctagaacttttttaaataaactttttttcaatgtg

SEQ ID NO: 818 - DNA, 236 bp; single-stranded, linear
  immediate source library: OVARTUT01
  immediate source clone: 816532
gtccttatanctgttgggttctaacccagaagtccagaaaaaagtggatcatgaattggatgacgtgtttgggaagtctgaccgtcccgctacagtagaagacctgaagaaacttcggtatctggaatgtgttattaaggagacccttcggctttttccttctgttcctttatttgcccgtagtgttagtgaagattgtgaagtggcaggttacagagttctaaaaggcactgaag

SEQ ID NO: 819 - DNA, 115 bp; single-stranded, linear
  immediate source library: OVARTUT01
  immediate source clone: 816957
tcatggatggttggtgtcatggaggggataggtctttggaagaaccttcctctgaagctggctctgtacatttaaataagaatactgcaaatcatcaaagcctttagcaagtctg

SEQ ID NO: 820 - DNA, 750 bp; single-stranded, linear
  immediate source library: PROSTUT04
  immediate source clone: 828764
ggtgggtgcgccgtgctgagctctggctgtcagtgtgttcgcccgcgtcccctccgcgctctccgcttgtggataactagctgctggttgatcgcactatgactctggaagaagtccgcggccaggacacagttccggaaagcacagccaggatgcagggtgccgggaaagcgctgcatgagttgctgctgtcggcgcaggttcagggctgcctcactgccggcgtctacgagtcagccaaagtcttgaacgtggaccccgacaatgtgaccttctgtgtgctggctgcgggtgaggaggacgagggcgacatcgcgctgcagatccattttacgctgatccaggctttctgctgcgagaacgacatcgacatagtgcgcgtgggcgatgtgcagcggctggcggctatcgtgggcgccggcgaggaggcgggtgcgccgggcgacctgcactgcatcctcatttcgaaccccaacgaggacgcctgggaaggatcccgccttggagaagctcagcctgttttgcgaggagagccgcagcgttaacgactgggtgcccagcatcaccctccccgagtgacagcccggcggggaccttggtctgatcgacgtggtgacgccccggggcgcctagagcgcggctggctctgtggaggggccctccgagggtgcccgagtgcggcgtggagactggcaggcggggggggcgcctggagagcgaggaggcgcggcctcccgaggaggggcccgg

SEQ ID NO: 821 - DNA, 271 bp; single-stranded, linear
  immediate source library: PROSNOT07
  immediate source clone: 836115
gccgcccatcatccacagggacctcaaggttgagaacttgttgcttagtaaccaagggaccattaagctgtgtgactttggcagtgccacgaccatctcgcactaccctgactacagctggagcgcccagaggcgagccctggtggaggaagagatcacgaggaatacaacaccaatgtatagaacaccagaaatcatagacttgtattccaacttcccgatcggcgagaagcaggatatctgggccctgggctgcatcttgtacctgctg

SEQ ID NO: 822 - DNA, 464 bp; single-stranded, linear
  immediate source library: PROSNOT07
  immediate source clone: 836623
cgagaagtgggaagcccagatggcagcctagaccctgggaaccacagcagatgggggctcctgggagatccacacagaggaatctggagcccaggaagcaacctggaggggccgtctcagtctcataaaaggggatcaggcaggaggagtttgggagaaacctgagaagggcctgatttgcagcatcatgatgggcctctccttggcctctgctgtgctcctggcctccctcctgagtctccaccttggaactgccacacgtgggagtgacatatccaagacctgctgcttccaatacagccacaagccccttccctggacctgggtgcgaagtatgaattcaccagtaacagctgctcccagcgggctgtgatattcactaccaaaagaggcaagaaagtctgtacccatccaaggaaaaaatgggtgcaaaaatacatttctttactgaaaactccgaaaca

SEQ ID NO: 823 - DNA, 249 bp; single-stranded, linear
  immediate source library: NGANNOT01
  immediate source clone: 857334
cgagcccgcagcggccgggcccgagcgnagagccgggccgagactgcaccatgcaggaagcgccactgcgctgcccacggagccaggncccagccccgtgcctgccttnctcggcaagntatgggcgctggtgggggacccaggnacagaccacctgatccgntggagcccgagcgggaccagtttnctcgtaagcgaccagagccgtttcgccaaggaagtgctgccccagtatttcaagcatagcaa

SEQ ID NO: 824 - DNA, 1536 bp; single-stranded, linear
  immediate source library: BRAITUT03
  immediate source clone: 859619
tccgcagtgcccctccccagcctcggccgggcctcccgggagccgggcgtggcgttccagctagtgagccgtttctcccctgggctcggaggcggaagcttgaggggcgcggggaggagcttcgcgtgcggggtgaacgcccgctctacgtgctcgttctcttcgcgaccgctgcgcgcgagccccgtgtccccacggngnnnnnnnnnnnnnnnnnnnnnnnnnnaacgcgganggggcgganggagcccgcggcgtcggcagcagctacagcgaaatggcggagaccgtggctgacacccggcggctgatcaccaagccgcagaacctgaatgacgcctacggaccccccagcaacttcctcgagatcgatacaaatcttcctattttcaagctgaaagaatctactgttagaagaagatacagtgactttgaatggctgcgaagtgaattagaaagagagagcaaggtcgtagttcccccgctccctgggaaagcgtttttccgtcacttccttttagaggagatgatggaatatttgatgacaattttattgaggaaagaaaacaagggctggagcagtttataaacaaggtcgctggtcatcctcttggcacagaacgaacgttgtcttcacaatgtttttacaagatgaaataatagataaaagctatactccatctaaaataagacatgcctgaaatttggcaagaaggggcaaaaacgtgactattaatgattgataagcaccagtgaagaagttctaacttttagcatgctgcacagaaactggtataacatgccttcagtatactaacactcatatgctcagttttgttttgttttggcagttgacaagaagttaatttgctttagtaaaaatccctcattccagcctttctatataaatagctctttcttgctgttttaatgtggtgcacactatagcctcacaaacctgttattccagtgtaatctgcagtgtcgtaactaaagttactggcttggtcttatttgcacagtttttgcgtcttgtttgcttcttgcatctgattaactagaatatttctctttcccccttttaatttgtgatgtcacttgaccccatttatgtgtaggagcactacaccattggtttccaatactgcacacataagatacatacttgtgtgcagaaagtatcttcctccaggcttgtaatacccttcacatggaagattaatgagggaaatctttatattctgtataaaaacaaaagcaaatttatatactaaaatcatttgtctaaaaatttaagttgttttcaaataaaaattaaaatgcatttctgatatgcactgattgtgttgcctccagctttttttgctctctatgagtgactacttaagtcacttgttgagagggattatttactaattatatacttctcattcctgtaactccattccctttaaacagtggtgatatcaaatatacttccatccattgaatggggtatttttaacaacaacaaaagtgatatactaaaaaatgtat

SEQ ID NO: 825 - DNA, 236 bp; single-stranded, linear
  immediate source library: BRAITUT03
  immediate source clone: 862403
ctggatcgcattactactgttgaacacttactcaagtcagtcttgctgtacaatatcaacaactcagtttctttttcctctgctgtcaaatgtgtgtgcaatctaatgataaaggagccaaagtcttctagcaggactctcggcagagctccatactcatttacctttaactcacagtttgaatttggaaagaaacacaaatggattcagattgatgtgaccagcctccttcaacc

SEQ ID NO: 826 - DNA, 308 bp; single-stranded, linear
  immediate source library: BRAITUT03
  immediate source clone: 866123
cggctcgagccaagatcccaagccggctctggtgactaaattcatggagaacggctccttgtcggggctgctgcagtcccagtgccctcggccctggccgctcctttgccgcctgctgaaagaagtggtgcttgggatgttttacctgcacgaccagaacccggtgctcctgcaccgggacctcaagccatccaacgtcctgctggacccagagctgcacgtcaagctggcagattttggcctgtccacatttcagggaggctcacagtcagggacagggtccggggagccagggggcaccctgggtt

SEQ ID NO: 827 - DNA, 1595 bp; single-stranded, linear
  immediate source library: LUNGAST01
  immediate source clone: 873034
ggagaaccagaacggttttgacctgggctgtctccagctgaccaacgagaaggtaggcgatgtggtgctacccccgtgggccagctctcctgaggacttcatccagcagcaccggcagggtctggagtcggagtatgtgtctgcacanctacacgagtggatcgacctcatctttggntataagcagcgggggccagccgccgaggaggccctcaatgtcttctattactgcacctatgagggggctgtagacctggaccatgtgacagatgagcgggaacggaaggctctggagggcattatcagcaactttgggcagactccctgtcagctgctgaaggagccacatccaactcggctctcagctgaggaagcagcccatcgccttgcacgcctggacactaactcacctagcatcttccagcacctggacgaactcaaggcattcttcgcagaggttgtcagtgatggtgtacccctggtgctagccctggtcccccaccggcagccccactccttcatcacccagggttccccagacctgttggtgactgtgagtgccagtgggctgctgggcacccacagctgggttgccctatgaccgcaacataagcaactacttcagcttcagcaaagaccccaccatgggcagccacaagacgcagcgactgctgagtggcccgtgggtgccaggcagtggtgtgagtggacaagcactggcagtggccccggatggaaagctgctattcagcggtggccactgggatggcagcctgcgggtgactgcactaccccgtggcaagctgttgagccagctcagctgccaccttgatgtagtaacctgccttgcactggacacctgtggcatctacctcatctcaggctcccgggacaccacgtgcatggtgtggcggctcctgcatcagggtggtctgtcagtaggcctggcaccaaagcctgtgcaggtcctgtatgggcatggggctgcagtgagctgtgtggccatcagcactgaacttgacatggctgtgtctggatctgaggatggaactgtgatcatacacactgtacgccgcggacagtttgtagcggcactacggcctctgggtgccacattccctggacctattttccacctggcattggggtccgaatgccagattgtggtacagagctcagcgtgggaacgtcctggggcccaggtcacctactccttgcacctgtattcagtcaatgggaagttgcgggcttcactgcccctggcagagcagcctacagccctgacggtgacagaggactttgtgttgctgggcaccgcccagtgcgccctgcacatcctccaactaaacacactgctcccggccgcgcctcccttgcccatgaaggtggccatccgcagcgtggccgtgaccaaggagcgcaccacgtgctggtgggcctggaggatggcaagctcatcgtggtggtcgcggggcagccctctgaggtgcgcacagcccagttcgcgcggaagctgtggcggtcctcgcggcgcatctcccaggtgtcctcgggagagacggaatacaaccctactgaggcgcgctgaacctggc

SEQ ID NO: 828 - DNA, 229 bp; single-stranded, linear
  immediate source library: LUNGAST01
  immediate source clone: 873352
cggcaactttctatgacattgaaacactaaaagttatagatgaagaatggcaaagaactcagtgcagccctagagaaacgtgcgtggaggtggccagtgagctngggaagagtaccaacacattcttcaagcccccttgtgtgaacgtgttncgatgtggtggctgttgcaatgaagagagcttatctgtatgaacaacagcaactngtacattttcaaacagntnttt

SEQ ID NO: 829 - DNA, 1574 bp; single-stranded, linear
  immediate source library: LUNGAST01
  immediate source clone: 875380
tttccgaagtgggagcgaacctggggcggccccccgccccccggccgcagccttcggaggagactgggccgccgangcggtcgtgagagacggacggagaggaagcgccggctggaatctcctaaccgcccgcttctcatcttgtcctggggcagggacctcaggatggaaaccagcagcctgcaccgcccgagaaggtcggctgggtccggaaattctgcgggaaagggattttcagggagatttggaaaaaccgctatgtggtgctgaaaggggaccagctctacatctctgagaaggaggtaaaagatgagaaaaatattcaagaggtatttgacctgagtgactatgagaagtgtgaagagctccggaagtccaagaagcaggagccaagaaaaatcataggcaagtttactcttgcccactccaaacagcccggtaacacggcacccaacctgatcttcctgggcagtgagtccagaagagaaggaatcgtggatcaatgccctcaactctgccatcacccgagccaagaaccgtatcttggatgaggtcaccgttgaggaggacagctatcttgcccatcccactcgagacagggcaaaaatccagcactcccgccgccccccaacaaggggacacctaatggctgtggcttccacctctacctcggatgggatgctgaccttggacttgatccaagaggaagacccttcccctgaggaaccaacctcttgtgctgagagctttcgggttgacctgggacaagtctgtggcccagctggcagggagccggcggagagcggactcagaccgcatccagccctccgcagaccgggcaagcagtctctcccgaccttgggaaaaaacagacaaaggggccacctacaccccccagggnacccaagaagttgacgcccacagagaaaggccgctgcgcctccctggaggagatcctatctcagcgggatgctgcctctgcccgcaccctccagctgcgggctgaggaacccccaacccctgccctccccaacccggggcagctgtcccggatccaggacctggtagcaaggaaactggaggagactcaggagcttctggcagaggttcagggactgggagatgggaagcgaaaggccaaggaccccccttcgagtctccgccggattctgagtcagagcagctgctgctgggagacggaacggctgctgggagaggcatcatcgaattggagccaggcaaagagggtgctgcaggaggtcagggagctgagagacctgtacagacagatggacctgcagaccccgggactcccacctcagacagaccaccccgacacagtcagtaccggaagagcctgatgtgagggcagggtggggtctggaacttgtcgggttggacagactcttatctccgtgttgctggataaagcttttttatttacctcaatcaaaaaaagaaaacaaaaatggaaaaaataaagnnaanngaanaaaggntgnananaaannnaangatggnnntgaagganggnnnggtanacnaagnatnaaaaggggggncccttttggggg

SEQ ID NO: 830 - DNA, 1727 bp; single-stranded, linear
  immediate source library: LUNGAST01
  immediate source clone: 877276
ctttttgggatttggatgagaaattggaagtactaactactttctagcatatctttaagaaaattgattgttatttactcccagatcctcttgcagacccagaattatcaggaacatagctctgtgattcatgagtgtccccatactgatgaattggagcatccatatggaaagcaaaggcagaattatcccagctgtattattttgatcttttggatgcaggtgccttaatgaagctctcaaaatattttaggagctgctcagggagtgttgggtggaactgtttggactacattgttttctcttagattatgtgatttttgttgggcactggcaaaaggtgtgtgtgtgaatgtgtgcatgtgtgtgaatgtnnnnnnnnnnnnnnnnnnnnnnnnnnnnnnnnnnnnnnnnnncagacatgcaaaactgcagctggaaataataccttagatttctaggtaagtctttccacatttcaataatgggtaagagtagaaccagggccgggtatcaattattgcttgctgtttgcaaccaggcataaaatcactttctcaaatcatccaccgttcctattaaatttatgccggaaactctccttctgtgagtataactcctgcagttcctatagcagataagatataagaaagtgcctcctagtgctcctccgcccgcttgtttgctaaaattccctttctctctaagtccaccattttcaagatttgtagatagtgtattagttaagacagctttgtcgatctggccagatgttttttctcctttgtccaaaggccagagaccatcccaggaagagtggtgggtggtttatacactggaaatgttgcgtttatgctttttaaaaacacacgttaacttcagaggaaggatgggcaaatctggtctagctgggtgaaacccttattttcccagagatgccttaacctttgttggttttggctttagggttcagagtcacttttgttcccttctccattctggagagggacttcccctacatagagccctgatttttgtggctgtggggattggaggtagcattcaaagatcagatgtgcttttcctcactttggagatgaacactctgggttttacagcattaacctgcctaaccttcatggtgagaaatacaccatctctcttctagtcatgctgtgcatgccgcttactctgttggggtctatataaatttgttgaactcttacctacattccaaagaagtttcaaggaaccataaatatatgtatacatatacatatataaaatatatatgttaaaataaaattatcaggaatactggcctcagttattgaacttttttgtttaagaatactttttttttaagctgagaagtatagggatgaaaaagatgttatattgtggtttgactattttccaacttatattttcatataatttatattttttaaaagctgaaaatttagaagcaagatgaaaaaaaggaaaagcaggtgctttttaaaaatcagaactgaggtagcttagagatgtagcgatgtaagtgtcgannnnnnnnnnnnnnnnnntgcaaaaaaattcttatggcggagttttttgtttgtttattttagtagctgatgctggcacatcattttgctggagagttttttatatactgtagcctgatttcatattgtattttaaactgtgtgaaattaaaaacaaagaatttcattcaaaaaaaa

SEQ ID NO: 831 - DNA, 300 bp; single-stranded, linear
  immediate source library: LUNGAST01
  immediate source clone: 877555
tctcaatgaaaggcagatgtccctttaaggtttgcttctacagcccgtggactttagcctaaacacggacccgcgaagttgggctttatttgtccatgtctcggacagagcctgggaagctgccagtgagatttcagagaccaagagcgcgaaggggcgggcgatgtggcaatccgtctgggatgtgaaaagcgtggagcgcatttagaggaattcgacgaaaacacaggaaatcactcctctnccgctcctgggcgccgtgccactggggcagaggacttggnaccgcggcancgggat

SEQ ID NO: 832 - DNA, 1153 bp; single-stranded, linear
  immediate source library: PANCNOT05
  immediate source clone: 887176
tcggcatcatccctgtgggcggcacttacctcattcagtctgttccagctgagctcaatatggatcacaccgtggtgctgcantggcagaggannacctgctgaaggaagggttggcgtggctggacttacaggccccaggggaggcccactactggctgccagctctcttcactgacctctactcccaggagattacagctgaggaggccagagcgccttggggagccggcggggtagtccgggacgtggagacccggggtcccggcagccgggcggcccgcgggcccagggtggggatgcaccgccgcggggtgggagctggcgccatcgccaagaagaaacttgcagaggccaagtataaggagcgagggacggtcttggctgaggaccagctagcccagatgtcaaagcagttggacatgttcaagaccaacctggaggaatttgccagcaaacacaagcaggagatccggaagaatcctgagttccgtgtgcagttccaggacatgtgtgcaaccattggcgtggatccgctggcctctggaaaaggattttggtctgagatgctgggcgtgggggacttctattacgaactaggtgtccaaattatcgaagtgtgcctggcgctgaagcatcggaatggaggtctgataactttggaggaactacatcaacaggtgttgaagggaaggggcaagttcgcccaggatgtcagtcaagatgacctgatcagagccatcaagaaactaaaggcacttggcactggcttcggcatcatccctgtgggcggcacttacctcattcagtctgttccagctgagctcaatatggatcacaccgtggtgctgcagctggcagagaagaatggctacgtgactgtcagtgagatcaaagccagtcttaaatgggagaccgagcgagcgcggcaagtgctggaacacctgctgaaggaagggttggcgtggctggacttacaggccccaggggaggcccactactggctgccagctctcttcactgacctctactcccaggagattacagctgaggaggccagagaagccctcccctgactgcatgtggaagggcacacagcagcaggcagggaggaggcggaggtggcaaataaacctgggcaattttgtttatac

SEQ ID NO: 833 - DNA, 268 bp; single-stranded, linear
  immediate source library: BRSTNOT05
  immediate source clone: 893413
ggcttcttttgtggctaaatctgctctcctgaatgaagttaaggttatctgtcatctggaagctttacactatttcctaaggccatgattccaccgtttcttttcattccacagagcattttttaggggttgggggacagagaagaaaagatcacttctaactctgggcttccattctcaggtaaccacctgctgttccaacaagtgcccatggttgaaattgacgggatgaagttggtacagacccgaagnattcttcactacatag

SEQ ID NO: 834 - DNA, 1102 bp; single-stranded, linear
  immediate source library: BRSTTUT03
  immediate source clone: 900544
ctggaattataggcgtgaaccaccgcccccggctgcagttggatttttaaattgcttttttttattgttgaggtttttttatctccaagggactctcccggcacttctaccttccagagttacttcagtgcataaagtttgaattattttgttcttgtgggcagaagtgggaatgatggaatatcctcacggaaaaggcagtgaagtttgggggtactgcttaaaaagcagggtcaccagtgcattatgtggcgtgttcatccccaaggccgtgtgtcacgggctagggcggcgtgttcatccccacaccgtgtgtcacaacaggctagggcacttcacggatgtcactacttgtttttctgacgttccaaaaacaacgtaactttggttttcatgtgtttttcccgtgggtatatgtgagattgatgctacgggtcttacggactcacacccgttcccactctctgcaatatggatcaggcagtgtttctgataggatgtgaaatggactctcctcgggtgggtccagcaggggccctgcccaccagaacacagtccgtgctgtgctgcgctaaggagctggccctcaactctccttggtgcagggttcccacaaccgagttctagttccctgaggtctttaaaaacaaaaacagaatgttgtacgtgaagattctaggaggggagggaccagcaaatctgagagaaccgtcctggggcctcccttcgaggagccctctgatgtgaggagggacttgagttgagtgacgctgtggtgtgaggtgttctgagctcactgaccggaaggtccaggtgaatctcgtcataagtgatctcaggctctcacaggatccggagggaaatgtgttagagggtctggaaaattcagtgcttttgagttacttgtttttattaaaaatttcctcacaaaagagagtcctcaagttgtggctgttcttgggaaaggggtcaccgtgtctgacaaagtgtaactttaaaaagcacgttgattttttacaaatgtaagtgtgcttgggaattccttaaattttgtgcaataaaactattttttggtaaagnacanaacaacaaaaaangggcg

SEQ ID NO: 835 - DNA, 297 bp; single-stranded, linear
  immediate source library: COLNNOT09
  immediate source clone: 907936
caattttngagcagttccccaacaaaagaagctacaggaggaactttctgacttatcagcaatggaagatgctttggatgagttaattaaggattgtcctnagcagctgtttgagttaacagatgacaaagnaaatgaaagactagcatatgtgacctattcaagacattnataggattnagggncttncatgaacagatcgtnaattgnaattaaagnttcangaagaaaccagattgggtngtccaggtttccaggggaggcttttatnacanggganattaggggganccaagg

SEQ ID NO: 836 - DNA, 1055 bp; single-stranded, linear
  immediate source library: COLNNOT09
  immediate source clone: 908419
attacagtttgagccactgcacctgggtaacttgccctattttaaagtcaagcaatgggaaggnntaacaagnttatatagtaatcagtttcatgncactaaaagtcatatagtcatagggttttttcatctttcatatctttgcctaaattcatttgctacagtgcaggaaccaaaacttgttcatctcatgattccctacatctgacataaggaaagtaagtgctcagaaaaatgtgcaggtcaataagttgcaaaagttggggctgcaattaatgctaacataagagctaaaatgcttgattagaaatgatctcaaaaccttttagaatttccaaaatcttcatattactgaaactgtcggaatatatgggtcttgaaattcagaagatgatagtcactcttcccatatttataggctattaaggcaagggatatcttaaacatcatattactttatttagatttctactactccaattattaatgttatgtatttctcattgttttacttcttcatggtattatgaagactatatagatgattcaaccaagcctgcaaatctccctcttgtggaattccactggacccaatctgttttccatttccattgcaatactactaaagccatacaatatcaagcaccctccctctaggtccagggactatcacagaagaagcaggcatgtaagattttaaggactggtttcgaggggtcgagtgtaggaaaacagcctgttgcattgtaagagtgatgtcatcttgaagagcagctggcatgatgactgctgtttgactcctgcataccaagatattctgcagcaatgtctttaaacagtgccggtagtacagataacccctcataaagatgcttatctaacctccccagtgttcaggtgtttcacaagaaagtctgagatatgactagctacacgttttgccaaaaatgcttgttatataaagggtacttttgggagggtgagtgccgccatttagtggctgctagaaacattgcttctgtttgtaagttcctattaaatgtttctttctgagg

SEQ ID NO: 837 - DNA, 313 bp; single-stranded, linear
  immediate source library: COLNNOT09
  immediate source clone: 908819
ctggatctggcttacaggggggtcggaagcctgtcctcaccgtctcgggggttgtggcccccgccccctccctatatgcacccctggaaccagcaagtcccagacaaggagagcggaggaggaagtcatgggaacgcagcctccagttgtagcaggtttcactattcctatgctggggtacacagtgagagtactcacttttcacttgtcttgctcttagattgggccatggctttcatcctgtgtcccctgacctgtccaggtgagtgtgagggcagcactgggaagctggagtgctgcttgtgcctccctg

SEQ ID NO: 838 - DNA, 290 bp; single-stranded, linear
  immediate source library: BRSTNOT04
  immediate source clone: 918331
gattntttgaggtaggtgtgttatgaactgcatcatgggaaacttttggcttagaagttaaatgacttgcctnagatcacatccctgctaagtagtggagccaacagtgtgctggagtccacttgcattggntcacaagagccaaatgtgcacatctnttctnagctctgtattcagtaacctcaggttggcagcttgaaatagcctacagtgggagtactacancacagaaattggcaaatgctacaaaccagagacctttttggagaaccacttgttaatatttaccc

SEQ ID NO: 839 - DNA, 287 bp; single-stranded, linear
  immediate source library: CERVNOT01
  immediate source clone: 934291
atttnccggcccagcggctacacctgcgnttgcgactntggnttncggctcagcccccagggcacccgatgcattgatgtggacgaatgtggccgcgtgcccccgccctgtgctcccgggngctgcgagaactnaccaggcagcttccgctgcgtgtncggccctgnnttncgagccgncccanggnctncggaatgcctggatgttgacgagttccaacngtnccgcggcgtgttancttgggcgntgcgagaacaacncangtagttctgtncgttttncccgnc

SEQ ID NO: 840 - DNA, 1678 bp; single-stranded, linear
  immediate source library: CERVNOT01
  immediate source clone: 935293
ggccgagccaggcacggcagctggccctctccaggcgcatggaggaattctccctttgccgttccaaggatgccgccgcctcctcccggggctcccgggggggtcagccaacactacaaagggcagcgagtcctcagggcgcccgggagccaccagtctgctctcgggctctactcagactagcgccaacagtctccgcggacagactcgcatcagccgccctggggctcggcctcctcccataggctcctcttcctctctttcattcaagtcttcaaactttgaaaaaaatatgagcttttgccaaataagacgggatagtttatggagttttctgaggcgcattgaactctggtcagcccctcgagcgtgggctcggccatcagcaggcccggtgggttggccgggctggccctcccaggctgcctttctctctggtcgcggcctggcccgccccggcctccaccgccgcaattcatgctggtgccgcgcccgcagccccactcctggtatgcctgagattctccaggggccaagccggtcctccttcccggcccactcttccagggccaggacgctcccgcggagccagcccatcgtggctgggggtcccaggggctggaggcctgcctggttagcctctgtttcccagacattgactcgaggcgcctccagtcctctcaaccccctgactttcaagtcctttcaagtccttgtgccctgaccaagttatgaggaaaagagggctgagggcctggaggtgggctcgcaccccctcgaacccacctagatgtctcctcctccccagcctatgagttcagacttggggggctccatctgtccctccctgaggtccctcatcttgtccctgctctgattctgtcagcagatcctgaacactccttggtggggacccatgcctccaaggctgcccccaatgccagctgtcctggggaaactccccagaactctcggggaaaggcccgagaaccttcggaggaagcctccgggactcctcgccacctgctctgtttctctcccggccccactgccttcaggtatcaggaagagggcaggcccctgtgccccctctccccttcccagggcggccaacaatactccaccatggggcgcttcctttcttctctggaaactaagacattggactgaaggaactggcctgaggggggctgaccgggggcccgtgctgctgggagctctacgcacaagaggccgccggggtcacggacaggaacctcagcccagggtgctggccttttctccttcgcaggagtcccccaaaatccacacagcgactcgagcagccttccactcagccagaggagggtcgggctcccccgcctgctctcggtggtggcgtctggcccttcctgccgtttccaaggcctccggaagcaccaacccagttctcagttacctcctctggccggaaggcttcacgttgtcctccagagctgctctgggcccagggctggctccgtgaccacctgatggacgtgctgggcagcatgggctcccaaggcagcatccccagctgctctcccaccccaccccagctgcccggcggctgggcccacgagggctctggggacacttccataggaaaggggcctggcactttgtgattgccacgtgtttcctgttaagccgcctgccc

SEQ ID NO: 841 - DNA, 405 bp; single-stranded, linear
  immediate source library: PANCNOT05
  immediate source clone: 949299
ctccagtctccgcgcctccacccagctcaggaacccgcgaaccctctcttgaccactatgagcctcccgtccagccgcgcggcccgtgtcccgggtccttcgggctccttgtgcgcgctgctcgcgctgctgctcctgctgacgccgccggggcccctcgccagcgctggtcctgtctctgctgtgctgacagagctgcgttgcacttgtttacgcgttacgctgagagtaaaccccaaaacgattggtaaactgcaggtgttccccgcaggcccgcagtgctccaaggtggaagtggtgtaagttctcctgtgttgctgtgtccactgtgacttaggcaagtcctccagcctgggtcgtcaacctttgtggctcatgggtgcatcctctttttctttacttcag

SEQ ID NO: 842 - DNA, 1904 bp; single-stranded, linear
  immediate source library: SCORNON01
  immediate source clone: 953491
tcaaaagcgtatgaaaataaaagagaaggagaagcggagaaaactgcttgaaaagagcagtgtagatcaagcagggaaatacagcaaaacagtagcttcggagaagttaaaacagctgaccaaaactggcaaagcttccttcataaaggatgaaggtaaagncaaggccttaaagtcctctcaagcattcttttctaaattacaagatcaagtaaaaatgcaaatcaatgatgcaaagaaaacagaaaagaaaaagaagaaaagacaggatatttctgttcataaattaaagctgtaatatattttgaatataatgtaaatattaatgtgtaagcttatattgtgtcattgttctgttttataataaaattcttgagaaccttcgcagatttggcaacaactggaattgcaaaatgaaccaattttacaatactttcagaatgcagttagtgaaacaattaatgatgaagatatcagtcttctcccagagagtgaagaacaggaacgtgaagaggatggttcagagatagaggctgatgacaaggaggacctagaagatttagaggaggaggaagtgtccgacatgggtaatgatgatcctgaaatgggtgagagagctgaaaactcaagcaaatctgatctgaggaaaagccccgttttcantgatgaggattctgaccttgactttgatatcagcaaattggaacagcagagcaaggtgcaaaacaaaggacagggaaaaccaagagaaaagtccatagtagatgataaattcttcaaactctctgaaatggaggcctatttagaaaacatagaaaaagaagaggaacgaaaagatgataatgatgaggaggaggaagatattgatttttttgaagatattgattctgatgaagatgaagggggactgtttggaagtaaaaaacttaagtcaggtaaaagttccagaaatctgaaatacaaagatttttttgatccagttgaaagtgatgaagacataacaaatgttcatgatgatgagctggattcaaacaaagaagatgatgaaattgctgaagaagaagcagaagaactaagtatttcggaaacggatgaagatgatgaccttcaagaaaatgaagacaataaacaacataaagaaagcttgaaaagagtgacctttgctttaccagatgatgcggaaactgaagatacaggtgttttaaatgtaaagaaaaattctgatgaagttaaatcctcctttgaaaaaagacagggaaagatgaatgaaaaaattgcatctttagaaaaagagttgttagaaaaaaagccgtggcagcttcagggggaagtgacagcacagaagaggccagagaacagcctcctggaggaggaccctacactttgaccatgctgtccggatggcacctgtgattacagaggaaaccacccttcaactggaagatatcattaaacagaggataagagatcaggcttgggatgatgtagtacgtaaagaaaaacctaaagaggatgcatatgaatataaaaagcgtttaaccttagaccatgagaagagtaaattgagccttgctgaaatttatgaacaggagtacatcaaactcaaccagcaaaaaacagcagaagaagaaaatccagaacatgtagaaattcagaagatgatggattccctcttcttaaaattggatgccctctcaaacttccactttatccctaaaccgcctgtaccagagattaaagttgtgtcaaatctgccagccataaccatggaggaagtagccccagtgagtgttagtgatgcagctctcctggccccagaggagatcaaggagaaaaataaagctggagatataaaaacagctgctgaaaaaacagctacagacaagaaacgagagcgaaggaaa

SEQ ID NO: 843 - DNA, 2302 bp; single-stranded, linear
  immediate source library: KIDNNOT05
  immediate source clone: 958978
ggacagctcggccgtcattactcagatcagcaaggaggaggctcggggcccgctgcggggcaaaggtgaccagaagtcagcagcttcccagaagccccgaagccggggcatcctccactcactcttctgctgtgtctgccgggatgatggggaggccctgcctgctcacagcggggcgcccctgcttgtggaggagaatggagccatccctaagaccccagtccaatacctgctccctgaggccaaggcccaggactcagacaagatctgcgtggtcatcgacctggacgagaccctggtgcacagctccttcaagccagtgaacaacgcggacttcatcatccctgtggagattgatggggtggtccaccaggtctacgtgttgaagcgtcctcacgtggatgagttcctgcagcgaatgggcgagctctttgaatgtgtgctgttcactgctagcctcgccaagtacgcagacccagtagctgacctgctggacaaatggggggccttccgggcccggctgtttcgagagtcctgcgtcttccaccgggggaactacgtgaaggacctgagccggttgggtcgagacctgcggcgggtgctcatcctggacaattcacctgcctcctatgtcttccatccagacaatgctgtaccggtggcctcgtggtttgacaacatgagtgacacagagctccacgacctcctccccttcttcgagcaactcagccgtgtggacgacgtgtactcagtgctcaggcagccacggccagggagctagtgagggtgatggggccaggacctgcccctgaccaatgatacccacacctcctcccaggaagactgcccaggcctttgttaggaaaacccatgggccgccgccacactcagtgccatggggaagcgggcgtctcccccaccagccccaccaggcggtgtaggggcagcaggctgcactgaggaccgtgagctccaggccccgtgtcagtgccttcaaacctcctcccctattctcaggggacctggggggccctgcctgctgctccctttttctgtctctgtccatgctgccatgtttctctgctgccaaattgggccccttggccccttccggttctgcttcctgggggcagggttcctgccttggacccccagtctgggaacggtggacatcaagtgccttgcatagagccccctcttccccgcccagctttcccaggggcacagctctaggctgggaggggagaaccagcccctccccctgccccacctcctcccttgggactgagagggcccctaccaacctttgcctctgccttggggggaggggaggtctgttaccactggggaaggcagcaggagtctgtccttcaggccccacagtgcagcttctccagggccgacagctgagggctgctccctgcatcatccaagcaatgacctcagacttctgccttaaccagccccggggcttggctcccccagctctgagcgtgggggcataggcaggaccccccttgtggtgccatataaatatgtacatgtgtatatagatttttaggggaaggagagagggaagggtcagggtagagacacccctcccttgcccctttcctgggcccagaagttggggggagggagggaaaggatttttacattttttaaatggctattttctaaatggaacaagctgggccaaggggcccaggccctgtcctctgtccctcacacccctttgctccgttcattcattcaaaaaaaacatttcttgagcaccttctgtgcccagcattatgctaggcccaccagctaagtgtgtgtggggggtctctacgccagctcatcagtgcctccttgcccatccttcaccggtgcctttgggggatctgtaggaggtgggaccttctgtggggtttggggatctccaggaagcccgacaaagctgtccccttcccctgtgccaacccatctcctacagccccctgcctgatcccctgctggctgggggcagctgccaggatatcctgccttccaactgtttctgaagcccctcctcctaacatggcgattccggaggtcaaggccttgggctctccccagggtctaacggttaaggggacccacataccagtgccaagggggatgtcaagtggtgatgtcgttgtgcttccctcccccagagcgggtgggcggggggtgaatatggttggcctgcatcaggtggccttcccatttaagtgccttctctgtgactgagagccctagtgtgatgagaactaaagagaaagccagacccctaaaa

SEQ ID NO: 844 - DNA, 310 bp; single-stranded, linear
  immediate source library: BRSTTUT03
  immediate source clone: 959745
gtgatgagcgcacgggctgcggagacgcaccggagcgntngcccagccgccggctccaagcccctgaggtttccggggaccacaatgaacaagttgctgtgctgcgcgntcgtgtttctggacatctccattaagtggaccacccaggaaacgtttcctccaaagtaccttcattatgacgaagaaacctntcatcagctgttgtgtgacaaatgtcctcctggtacctacctaaaacaacantgtacagcaaagtggaagaccgtgtgcggcccttgncctgaccantantacacagacagctggcaca

SEQ ID NO: 845 - DNA, 272 bp; single-stranded, linear
  immediate source library: BRSTNOT05
  immediate source clone: 965517
ccacgcgtccgccagaaaccttcacctctcatgctgaagctcacacccttgccctccaagatgaaggtttctgcagcgcttctgtgcctgctgctcatggcagccactttcagccctcagggacttgctcagccagattcagtttccattccaatcacctgctgctttaacgtgatcaataggaaaattcctatccagaggctggagagctacacaagaatcaccaacatccaatgtcccaaggaagctgtgatcttcaagaccaaacgggg

SEQ ID NO: 846 - DNA, 1881 bp; single-stranded, linear
  immediate source library: MUSCNOT02
  immediate source clone: 971847
ctgcttttgaaaaaaaatgttttgcttcttacaaaatcatttgtgttaataacaaaaactttattttcggagtgttctttgtataacttttccaagcttttacattaacgagcaggcctctgtcttaaaagggactcagtatattaatttctgcattttttaaatcaaatgaaaaacgtcaaattggaccaattgtcttggtttcttgattcatttatttgagaaaaaaacaatacaaagaaatgcattcatatcaaaattggaatagaaaggaaaacctatttttaagatatcaacctattttcacatcataaaacatctattacataaaataaaggtccaggcatagcaaagagttcacaaaacaggtttgtatgtagcacctttcatgcaaggcatgcaaaaagcctattttaaaatcactgtgcatattatagagttgtagccacctcacaatgaagtactacagcctgtgctgtcttaatggtttatgtcaggaaatgaaaaagatactgtaccaaatctggaattacaatggggagtaataatgtatactaaatgacttttgtattttaagttactttttgtgagtggtgaatttttgtgtttttcttttcagctacacttagtcctgagatgtattttttctttaagtcttgaatgaatacaaaaggagcccattttataatataaaccttgatgtacatgttgagatatttggacaatgaaaatgccttaaaaggaatgcatatggataaagttgcacttataacacccttcaacaaaatctaattttaaattgtctttttcttttctattaagggttttctttttcagtgtctaccattgtacttataactgttattaaataccaaatcaaataatataaaagctgtaacatttcctttaaaactaatgctaataagggatttagagttgaatggcaaaatgtttattacttggcaatacctgatgtcagtcacaggcatccaactcatgacaagagataccactgtttgttttttaaaaaacatttttcattttgtttctccttcaaaaattaagttggactaacattcacgtatcaaactaatataaaaaganataaaaccaagaggtgatttttgttaaagacttacttaaccaatattattgattaccagacttttatgaaagccaaagactgcttgctagtaggaaaaaatttcaaataataaccaaagctgaaaaatggtctgtcataaattatttccccggtaatttttgaaaggaaaaatgtataacaagtactatttacatatctgcatttaaaaaagcaattcttagaatacttcctttacattattctcctattttagacattttgtgaaagagaacaaattgtccagtggcctcctgtcagatcaacaattattatactccttaattccatgcaaatttaaatgaatgctataaaattttaaatctgtagcctgggtgtacgtttcactcaagttctcctactgaggactcttgactaacagcatactggcagtttcaccttaacctgctcgttaaataatgtgttggtgtgaggatatcaggaatgtctcatgatatcacgtttaccatttacaccatctgcaaccatatgctattaataaaatggaaaaaaacaaaatggtcattttgcatatacttcactctgacctagtttagtccatgatactataattgtgagagcatatccagatgctgtgttctctatgtaaaacagtattgtccattcagaaatgtgtgacccttcatttatggatattgactatatgtaatgcagtgctatcccaatattttccaataaanggncntttaatggcttcnggggnaaaannaaaanaaaaa

SEQ ID NO: 847 - DNA, 527 bp; single-stranded, linear
  immediate source library: MUSCNOT02
  immediate source clone: 974618
agcagcgcgtggtgctgcggcgctgcgtagaagtatcaatcagccgnttgcttttgtgagaagaattccttaggactgcggcgtcgagtcagctgaaagaacactttgcacagttcggccatgncagaaggtgcattttaccttttgacaaggagactggctttcacagnggtttgggnnggnttcaggttttcttcngttgnaggacttnggattgcactacaacnggaaggtcactttntacctggtgtancgggccagngncaggtntggcngncataatgctngtactngncttcttatttgantnaaagacnatttaagcacacaancttagtaatattatttaancnnaanttnatgttttatagncccctggggnntnngnnttttcanncaaagtccaaaatttaaagattcctttntttantnttgtaatccttcctntggantggntagnntntcagtccngttttagtccagattgttcctttcgaaggaccgnatttggttttaaatcttccttt

SEQ ID NO: 848 - DNA, 968 bp; single-stranded, linear
  immediate source library: BRSTNOT02
  immediate source clone: 978696
agctttccgagtctggtgggcaggacttctcgctgcccttccaagcccggctttgggccagaaaaggcttccccaggtggctcttctaccaggcttttcctttgatgccgcctggatttccgcacctgcctgtctcctctcccagagnacagtatttgggagactttgactatttattcagactcctggctatgtattgcacattggcaagtgctctggggatgaggcatgggtataggaagggagaaaggagttggagacaagatcctcttcattttccaagatcaaagtcagcctcttctccccatgcttctaggaactgcctggttttcaagcaggtcctggctgagcgggctctgagttctgtactggaattgagtgtaaagatgggaagagaactgggctgactccaggacctccaggatgaggcagaggcatgatgcttcctgctcacctgggccaccctctctccaggacttgtcagctggtggttcagccccttctccaaccccttcataagcttgggccactgcctgggacccagcagacactggccaggactctttagtgcactcactcttgtctgccccctaccttccctcctggaaccacactacttgaatcaccattactttgcctcgctggcagagttgggtcaagtgccctctccttgaccttgagatgaaggtcaagagcacagggaccaggccttggttaggctgagctcccagcaggacaccgcctgcagaaaggacctgccctgataatgtcccttccccagattctcaagcagatgcccaagggaggtccccacagagccagagtgcctgaggcttcctgcttgagaacctgccccctggatcttggacacttacagattgagctgtatgaattcagcgggtctcactccagagggtcagaacgtttgctttagttttttcatctgttttgttccttgagtcagtgct

SEQ ID NO: 849 - DNA, 1784 bp; single-stranded, linear
  immediate source library: TONGTUT01
  immediate source clone: 983922
cttcctgctaagcctaatccaagccttacccagctgtgctactgtcatttgcaaagcaaggaaatactactactggtaataaaactacacatgcaagatgtcagataagaaataggtttatatttaccttcctgcgatgtggggttggtgcttgaagataaatgtgctgtttctagtttcttaaatagcccacacccctggatgcaaaaaggcagggttatttttacccatgagcatcctgtgcaggcaatagacttccctcactgtctccgcctgcagggaggagaatgtaccccactgcacctgagctcctggtccctcagccaagacctcaggggtccccagccagcctgctgctggggacccctgtgcttgctgcagtgtatggagcctcttgccttcccctggggaggcacccctgtaccccagcttccttcccctggccttttctggccccagtgctcctcctttacatagacttgttcacacagaaacgtgcacgcccccttttctccgccacttcaccagtttctgaaatccaacctcccagacttcacaggaagatagatattcttgagataatgaaaagtgatatcttcgcatacgaaaggaaaaaaggttgaggtatatatgatttttaactgtattaggggtgtatgaaccagtttaaaaacgaggttttatttactgtagagatgaatgcaaatcagaaccaatgatcccttggcctacttagttaaaaccagttcatacatcccnnnnnnnnnnnnnnnnnnnnnnnnnnnnnnnnnnnnnnnnnnnnnnnnnnnnnnnnnnnnnnnnnnnntggggtttcttgtgttttttctttgcgactctccacactaaacttgcaatattgtggggagaagctgtgactaaactctacgctgcggtgagatgtagcagtaatcagctcccagcgacgtgtgtagctggggctgccgctcgcaataatcactattgatttaaagctttacttagccttgatctgtaccctcgtagtcaataaggtcttgccacattttattagtgaggtggagaaacgtattatttgtttgttgtttttgcccttcccccaccccccaatagttaaactgtgaaatttgtgatttgtttaaactctgggtgaatcatagcttagtttgcatgtcccagctaatttgtttctatacattttgtttgattctctttctccttctctcagggcttttacaaaaaaatatatatatatggatcttctgaaaagttttttgaggtgcaagttttttctcttgttttttttnttttttttttctcattgattaatggacatgatgctgagattcaatcactacatgaaacacctggctgtgaaaacaaaacaacccagagggctgtgttccaagcagcgctggggaagctacgtaacagtcggatgccagttttggaagattcaccatgcgttctgaccctctgttcgtctctttcctctcctctttcttcaagaaggaaattgatcctagtgatttcagcccatgcattaaacaggaaacaataataaatttgtagaattcatatttttctaaagggaacttaaaaactgctgctacatgttatgtacaaaactggtttatgccacatgaacagagaatcacaagtttggttttggtactttttgttcctctttgtattcagttgtatagaacttccaaattcagaatgagaagaaagctgttctgtatcaaaccatttaagccaataaatgttatattttaaaagctgca

SEQ ID NO: 850 - DNA, 2373 bp; single-stranded, linear
  immediate source library: TONGTUT01
  immediate source clone: 984212
ctcttcaaggacatccagtcactgccccgaaacgccgccctcaggaagctcaatgacctgatcaagcgggcacggctggccaaggttcacgcctacatcatcagctccctcaagaaagagatgcccaatgtctttggtaaagagagcaaaaagaaagagctggtgaacaacctgggagagatctaccagaagattgagcgcgagcaccagatctcccctggggacttcccgagcctccgcaagatgcaggaactcctgcagacccaggacttcagcaagttccaggcgctgaagcccaagctgctggacacggtggatgacatgctggccaacgacatcgcgcggctgatggtgatggtgcggcaggaggagtccctgatgccttcccaggtggtcaagggcggcgcctttgacggcaccatgaacgggccgttcgggcacggctacggcgagggggccggcgagggcatcgacgacgtggagtgggtggtgggcaaggacaagcccacctacgacgagatcttctacacgctgtcccctgtcaacggcaagatcacgggcgccaacgccaagaaggagatggtgaagtccaagctccccaacaccgtgctagggaagatctggaagctggccgacgtggtacaaggacgggctgctggacgacgaggagttcgcgctggccaaccacctcatcaaggtcaagctggagggccacgagctgcccgccgacctgcccccgcacctggtgccgccctccaagcgcagacatgagtgatggcgcccggccccgcacctgccatttgcacgcccggccgggaggcagagacggggggaggggaagcctcaccatttctcaaggtccataaagactgagcggatgtttcctcgcctctcgaaaaggaaaaccaccatctttcttttaaggctgttcctgggcctggcgggggaggcaggggtgagaggatggaattgtgtgcacaagaactgtggctattttaatatataacgttagaggctgcgttctttgtcgccgcctcccctgtgtgccagccctgtgtgcacggcctctgccccccggcctttgctgtggctggagctggacagtgcagtgactgcgaccgtgggggagccaggtcgcccttttggcagctgctaggctgaggctgcatggacaggaacaccaggcaccctccgtgtgcttctgagctgaggttgcttcacgggaccgtggcttccttcctcacctggctctgcctcccccgtgctctcgggcgaagtgggttcttgtgccttcccctcccgggcccaggctccccgtgcgcgggccctgccctttcctcccgcgccccaccggctccgacgcgcaaccccgctcagcagtcacagaaggcagggcccagccaccttggtctttttttgggagttcaggggagtaggagaatgtcttccagaaaaatacataagctagtttctgttctgtaaagtgatatctttcatacttgaccaaagttcccaataacttcccaaccactgttcaaaagctgtgatttttgtctccccttcccaccctccagccaaggagcagccctgcccagggggcattaggtgtgggtacccggggagcaccccgttcctggaccccagtgttgcatttcctggctgaggaagggtggtcatcccagctcctgccctaccctctcacttaactggagctttgggacgcaccctccacagtgggaggtggtggtgggtggcggtggcggggcctcacgacagcttggtgctggtaagaggaagcccgtggttctggctaggctctcatgtccagacagcggggaccaggggaaaacccagccccttctgtaatcccccttcatttcctaccttcttgctctctgtttagcaaaggagggcagctcacttggatgtccttacaacgcccctggcccccaggttgaggcaataagaaaccagaaccttgcggcccagtggcccgggccagttcaggccgcctccccctcctctgcctggggccattgagcccagcctccagggcccgggtgcgtttgcaggccagtggccactgtccgggctgtgatggcaccaaggcaggtggagcaccaggtaccacacagctgggcttcccaccaggctttcccgcgggggtctcagggagcttctccccagcgctgctcggagtctgcaggaactggccttgttctccttagcccgtcactccatacagtattaggtgaggatggatgcgggcgctgtccttggccgggaagtcactgttgaagttgcagtggcttgatcacacctgtgggaagagaagtgaagactttctccttgcattaaaaagtctgaactgtg

SEQ ID NO: 851 - DNA, 1317 bp; single-stranded, linear
  immediate source library: COLNNOT11
  immediate source clone: 991324
gagcagaagnctaaggnctaatagcggaatgaaatacctgtctgctcagtagaaccttgcaggtgctgtagcaggcgcaagaccgtagatctcaggcctctaacacttccaactccagccaccactttcctgtgcattttcactcctgagaagtgctcccctaactcagatcccctaacttagatttggcccccaactccatttcctgtctgtcttagacagcccttccaactgtgtcatctcttctctggaggtcaatggtggagggagatgcctgggtcctgttcttcctacataaaatgcaagaaaacagcatggccagtaaactgagcaagggccttggaatccttgagaatcacatttatgtgcttatgattacgggcaagctaattaaccttgttgaatctcagattccccatttgcaacattaggttaagaccagtactgcaggattgttgcactaaatgaaatactgtatgtgaagtgcctggcacagtgtctggtacatttgtgtttaataaaagctaactccatgttcatccctttgggaggggctccccggaaacctggatgctgctgtctactcgcctcgaacacaatggattcacttctttaagggagacaaggtgtggcgctacattaatttcaagatgtctcctggcttccccaagaagctgaatagggtagaacctaacctggatgcagctctctattggcctctcaaccaaaaggtgttcctctttaagggctccgggtactggcagtgggacgagctagcccgaactgacttcagcagctaccccaaaccaatcaagggtttgtttacgggagtgccaaaccagccctcggctgctatgagttggcaagatggccgagtctacttcttcaagggcaaagtctactggcgcctcaaccagcagcttcgagtagagaaaggctatcccagaaatatttcccacaactggatgcactgtcgtccccggactatagacactaccccatcaggtgggaataccactccctcaggtacgggcataaccttggataccactctctcagccacagaaaccacgtttgaatactgactgctcacccacagacacaatcttggacattaacccctgaggctccaccacccaccctttcatttcccccccagaagcctaaggcctaatagctgaatgaaatacctgtctgctcagtagaaccttgcaggtgctgtagcaggcgnaagaccgtagatttnaggcctntaacatttcnanttcagccaccattttcngggaaattttaattctggggggtttccccnaaatt

SEQ ID NO: 852 - DNA, 641 bp; single-stranded, linear
  immediate source library: COLNNOT11
  immediate source clone: 991781
caaatttcttgtaactattggaaataaactaatgaggtagaactgtcatatccaaatggaagangtggttggtactgttacttccttttgctgtcagagggttgttgacaatggcaaggggggatgttagtgagatccaggtggtggtggcttcttggtccactcagcttgcacacatgcaagaggagggtctgtggcccctcagccgtgctggtggcctccttcctcaagctttaacttgtgccctccctggcaacagggagttatgggttaatgttaactgtcatgnctntttcttnagggnaaatattaaaagggtgcagagctctctgttttacttcgtgaaacattagcagctctgaggggcttggcttttggtaagggacttatagtctgacttgccacaagcaccttgagctcctgggttggttggtggttggttggttgggttgttttaaatttgatttttcttttcctgaagtttgttagaagtcagacctatgcaaggaaaaccatggcccacttcagcagccatccagtgggggtgcttaatcggtggtggtaggattcatggaaacgtttttttgaaatgaaagagaagatgatgtacttacattgtaaaatggtttacaataaaaagt

SEQ ID NO: 853 - DNA, 270 bp; single-stranded, linear
  immediate source library: KIDNTUT01
  immediate source clone: 995140
cacctgaactcaagcactgtgatgctgcagtagtcggtctgaccactaaggtggctactgagtgactcagggcaggtggcgtatacggtgtggacatgctggacaaagagaagagactcgtgccctaagcgggacagagtgggacagtcgagatttcatcatacttctcagaatngtgtgcagtttaaanctacaaagtgtttatttctggaattttccatttaatcttttcagactgtggctgaccacgggtaactgacaaccgtggng

SEQ ID NO: 854 - DNA, 2053 bp; single-stranded, linear
  immediate source library: KIDNTUT01
  immediate source clone: 996226
attcgaaatgcctctctcagacccatcttggaggctgattacttactgcaccaaagctatcactggggtgagatttactgtttggacaaatttagccccatcccttcaaaaatacacttgtaaccaggtttcccagagttgttgataggcttctgctgaacatatgccaacccacctgcataatatatttttgttgcttttataaatcatgcattacataaagtgtgacaacttcaaaatgtattctctgttcttggaatacagtgccctaaaatggtgttcttatgacccagattgtggataataattgaattggtttttaaaggcaacatagcattctacagcagggttaatctattatcaagaacagtcaccctggttaataacaagttttactgatcagttgctggttgggttggttggttggcatgtgggtgtgtgggtgtataggtgtgtgtgggtgtgtgtgtgtatttttccccatgagtcctttttttaatcctgtggctttttcacttacaactaggcctaaccctgtaattttcctacatccaagaaaacaatcacaaagtagtggtttaaatactttgttgtatttggctaattttgctgtcttaatgcagcctattaagagttgggttaaaaatcagtaatcagtactttattacatcactgaactaaaatatggagacatcctcattgaaaatggagggcactctatcagtctataactatcaacgtagtgccaacagggtgttttgatacctttgttttcacctcttgacataatgctatttaaaggcttgaatttttccctttatataattttcacctttactttcaaagtgttttgttgtagttggctaattgcagagagtgcattgtcctatcattcctaaacctggtctgctttctacattcatggtatggaaaccatgtgattctttgtacagtttatcctgatgttgcttgtaatgcagtagaggctatttcgccttcgcttttctttctcgacctttttgtaaaccctataattatgaagcgattgcttgagaaaataacatataaacatagaatagaatagactgaccaagatggttcacagtttctttttttaacctaggttatttaataatggatttcctgaaaccacttgggcagacaaattcacaacacttaatgttcatattttgagtaaaggaagctaaaaccatgtttgctttctggtactacatgcattagcgaaaggttaagtaagttttgttctccactgaagtaatacttaacatctcagaaaaaattttgcatgttctgtagttttgtattaaatcagtcatttcatatgcactatatcaagtacaaacaggtagtttacctgtttatagtagtgtactaacaaagtctcccttgcagcttcagactgttatctataggcttatcgttcaaatacagcacttgaatatcccaagtagttcttctacgcatagctcacctttctaaacccagttaagcatggaagagaggtagtaggtaggtgcagtgtgtggaagctgcaaacaagtaggccttttattcattgatatcttttcccaagtactggattttaaatctgtatgtatctgtttgattttttttttctaatatttcagttgagctgctgttttcttccatgcaatattgtatacttcaattgtgtatagaagaagctggtgagagtgccctcctacataaataagcaattgcagtgttttgcatgcaaaatataaaaaatttaaattgtcctgattctattttgtaaatggagaaacaatcatatctttctaagcggtaatggaggaagactagtgctttgtgcattttgatatatttgagttcattttttccacaatgtcatacttttgacgcagttgggtttctcataagtatcctagttcatgtacatccgaatgctaaataatactgtgttttaagttttgtgttgcaagaacaaatggaataaacttgaattgtgctacagctaacaaaaaaaaaaaanaaaananaaaaaaaaact

SEQ ID NO: 855 - DNA, 1672 bp; single-stranded, linear
  immediate source library: GENBANK
  immediate source clone: g1000283
ggcggcggccggctcccgcaggcgccgaggcaggcgagcccccggccccaggcgcccgggccccgccgccgcccgcgcgcggcgcggcattttattcaggcgacgcttaagggagccggccgcgcccggtgcattgtgggaggcccgcggccgttttcgggaggaaggcggaggggccaaagcgagccggtggatccataaagaacccagccaacccgcagagggaggggaggggctgagctgtgaggagagcggggcccaagaaccatgtctacgcgggagtcctttaacccggaaagttacgaattggacaaaagcttccggctaaccagattcactgaactgaagggcacaggctgcaaagtgccccaagatgtcctgcaaaaattgctggaatctttacaggagaaccacttccaagaagatgagcagtttctgggagccgttatgccaaggcttggcattggaatggatacttgtgtcattcctttgaggcacggtgggctttccttggttcaaaccacagattacatttacccgatcgtagacgacccttacatgatgggcaggatagcgtgtgccaatgtcctcagtgacctctatgcaatgggggtcacggaatgtgacaatatgctgatgctccttggagtcagtaataaaatgaccgacagggaaagggataaagtgatgcctctgattatccaaggttttaaagacgcagctgaggaagcaggaacgtctgtaacaggcggccaaacagtactaaacccctggattgtcctgggaggagtggctaccactgtctgccaacccaatgaatttatcatgccagacaatgcagtgccaggggacgtgctggtgctgacaaaacccctggggacacaggtggcagtggctgtgcaccagtggctggatatccctgagaaatggaataagattaaactagtggtcacccaagaagatgtagagctggcctaccaggaggcgatgatgaacatggcgaggctcaacaggacagctgcaggactcatgcacacgttcaatacccacgccgccactgacatcacgggcttcgggattttgggccatgcgcagaacctggccaagcagcagaggaacgaggtgtcgtttgtaattcacaacctcccggtgctggccaagatggctgcggtgagcaaggcctgcggaaacatgttcggcctcatgcacgggacctgcccggagacttcaggcggccttctgatctgtttaccacgtgagcaagcagctcggttctgtgcagagataaagtcccccaaatatggtgaaggccaccaagcatggattattgggattgtagagaagggcaaccgcacagccagaatcatagacaaaccccggatcatcgaggtcgcacacaagtggccactcaaaacgtgaatcccacacccggggccacctcttaatctagacagaaatagctgtttggttttgtttttaaatagatctatttcccttatcacttcaattaaagactataaacaacaaaaatctcattgtgtctacacatcggggtgaccttaggtcggtttgtaagtggatacaattaataaaataaaatccattgcctttttttcctgttacattaactgaagatcgacctaatcttgaggcagcttctgagttgagaatt

SEQ ID NO: 856 - DNA, 1855 bp; single-stranded, linear
  immediate source library: GENBANK
  immediate source clone: g1004356
ccatgtcgctcactgtcgtcagcatggcgtgcgttgggttcttcttgctgcagggggcctggccactcatgggtggtcaggacaaacccttcctgtctgcccggcccagcactgtggtgcctcgaggaggacacgtggctcttcagtgtcactatcgtcgtgggtttaacaatttcatgctgtacaaagaagacagaagccacgttcccatcttccacggcagaatattccaggagagcttcatcatgggccctgtgaccccagcacatgcagggacctacagatgtcggggttcacgcccacactccctcactgggtggtcggcacccagcaaccccctggtgatcatggtcacaggaaaccacagaaaaccttccctcctggcccacccagggcccctgctgaaatcaggagagacagtcatcctgcaatgttggtcagatgtcatgtttgagcacttctttctgcacagagatgggatctctgaggacccctcacgcctcgttggacagatccatgatggggtctccaaggccaacttctccatcggtcccttgatgcctgtccttgcaggaacctacagatgttatggttctgttcctcactccccctatcagttgtcagctcccagtgaccccctggacatcgtgatcacaggtctatatgagaaaccttctctctcagcccagccgggccccacggttcaggcaggagagaacgtgaccttgtcctgtagctcctggagctcctatgacatctaccatctgtccagggaaggggaggcccatgaacgtaggctccgtgcagtgcccaaggtcaacagaacattccaggcagactttcctctgggccctgccacccacggagggacctacagatgcttcggctctttccgtgccctgccctgcgtgtggtcaaactcaagtgacccactgcttgtttctgtcacaggaaacccttcaagtagttggccttcacccacagaaccaagctccaaatctggtatctgcagacacctgcatgttctgattgggacctcagtggtcatcttcctcttcatcctcctcctcttctttctcctttatcgctggtgctccaacaaaaagaatgctgctgtaatggaccaagagcctgcgggggacagaacagtgaataggcaggactctgatgaacaagaccctcaggaggtgacgtacgcacagttggatcactgcgttttcatacagagaaaaatcagtcgcccttctcagaggcccaagacacccctaacagataccagcgtgtacacggaacttccaaatgctgagcccagatccaaagttgtctcctgcccacgagcaccacagtcaggtcttgagggggttttctagggagacaacagccctgtctcaaaaccaggttgccagatccaatgaaccagcagctggaatctgaaggcatcagtctgcatcttaggggatcgctcttcctcacaccacgaatctgaacatgcctctctcttgcttacaaatgcctaaggtcgccactgcctgctgcagagaaaacacactcctttgcttagcccacaaggtatctatttcacttgacccctgcccacctctccaacctaactggcttacttcctagtcctacttgaggctgcaatcacactgaggaactcacaattccaaacatacaagaggctccctcttaacacggcacttacacacttgctgttccaccttccctcatgctgttccacctcccctcagactatctttcagccttctgtcatcagtaaaatttataaattttttttataacttcagtgtagctctctcctcttcaaataaacatgtctgccctcatggtttcg

SEQ ID NO: 857 - DNA, 828 bp; single-stranded, linear
  immediate source library: GENBANK
  immediate source clone: g1008914
gggggagtgaaagcgaaagcccgggcgactagccgggagaccagagatctagcgactgaagcagcatggccaagccgtgtggggtgcgcctgagcggggaagcccgcaaacaggtggaggtcttcaggcagaatcttttccaggaggctgaggaattcctctacagattcttgccacagaaaatcatatacctgaatcagctcttgcaagaggactccctcaatgtggctgacttgacttccctccgggccccactggacatccccatcccagaccctccacccaaggatgatgagatggaaacagataagcaggagaagaaagaagtccctaagtgtggatttctccctgggaatgagaaagtcctgtccctgcttgccctggttaagccagaagtctggactctcaaagagaaatgcattctggtgattacatggatccaacacctgatccccaagattgaagatggaaatgattttggggtagcaatccaggagaaggtgctggagagggtgaatgccgtcaagaccaaagtggaagctttccagacaaccatttccaagtacttctcagaacgtggggatgctgtggccaaggcctccaaggagactcatgtaatggattaccgggccttggtgcatgagcgagatgaggcagcctatggggagctcagggccatggtgctggacctgagggccttctatgctgagctttatcatatcatcagcagcaacctggagaaaattgtcaccccaaagggtgaagaaaagccatctatgtactgaacccgggactagaaggaaaataaatgatctatatgttgtgtgg

SEQ ID NO: 858 - DNA, 578 bp; single-stranded, linear
  immediate source library: GENBANK
  immediate source clone: g1008970
cagaagacctcctgtcctatgaggccctccccatggctttagctgacttgtatgaagaaggaggtggaggaggaggagaaggtgaagacaatgctgactcaaaggagacgatctgccgaccctctgggagaaaatccagcaagatgcaagccttcagaatctgggatgttaaccagaagaccttctatctgaggaacaaccaactagttgctggatacttgcaaggaccaaatgtcaatttagaagaaaagatagatgtggtacccattgagcctcatgctctgttcttgggaatccatggagggaagatgtgcctgtcctgtgtcaagtctggtgatgagaccagactccagctggaggcagttaacatcactgacctgagcgagaacagaaagcaggacaagcgcttcgccttcatccgctcagacagtggccccaccaccagttttgagtctgccgcctgccccggttggttcctctgcacagcgatggaagctgaccagcccgtcagcctcaccaatatgcctgacgaaggcgtcatggtcaccaaattctacttccaggaggacgagtagtac

SEQ ID NO: 859 - DNA, 2817 bp; single-stranded, linear
  immediate source library: GENBANK
  immediate source clone: g1015963
gaacagcaaagggtagagcagacctgcgccaggggcgcacaacggccgtgtccacctcccggccccaagatggtgcttcccacaggcagccacgcgtagcagccagagacagctccagacatgtggctcttcttcgggatcactggattgctgacggcagccctctcaggtcatccatctccagccccacctgaccagctcaacaccagcagtgcagagagtgagctctgggagccaggggagcggcttccggtccgtctgacaaacgggagcagcagctgcagcgggacggtggaggtgcggctcgaggcgtcctgggagcccgcgtgcggggcgctctgggacagccgcgccgccgaggccgtgtgccgagcactgggctgcggcggggcggaggccgcctctcagctcgccccgccgacccctgagctgccgcccccgcctgcagccgggaacaccagcgtagcagctaatgccactctggccggggcgcccgccctcctgtgcagcggcgccgagtggcggctctgcgaggtggtggagcacgcgtgccgcagcgacgggaggcgggcccgtgtcacctgtgcagagaaccgcgcgctgcgcctggtggacggtggcggcgcctgcgccggccgcgtggagatgctggagcatggcgagtggggatcagtgtgcgatgacacttgggacctggaggacgcccacgtggtgtgcaggcaactgggctgcggctgggcagtccaggccctgcccggcttgcacttcacgcccggccgcgggcctatccaccgggaccaggtgaactgctcgggggccgaagcttacctgtgggactgcccggggctgccaggacagcactactgcggccacaaagaggacgcgggcgtggtgtgctcagagcaccagtcctggcgcctgacagggggcgctgaccgctgcgaggggcaggtggaggtacacttccgaggggtctggaacacagtgtgtgacagtgagtggtacccatcggaggccaaggtgctctgccagtccttgggctgtggaactgcggttgagaggcccaaggggctgccccactccttgtccggcaggatgtactactcatgcaatggggaggagctcaccctctccaactgctcctggcggttcaacaactccaacctctgcagccagtcgctggcagccagggtcctctgctcagcttcccggagtttgcacaatctgtccactcccgaagtccctgcaagtgttcagacagtcactatagaatcttctgtgacagtgaaaatagagaacaaggaatctcgggagctaatgctcctcatcccctccatcgttctgggaattctcctccttggctccctcatcttcatagccttcatcctcttgagaattaaaggaaaatatgccctccccgtaatggtgaaccaccagcacctacccaccaccatcccggcagggagcaatagctatcaaccggtccccatcaccatccccaaagaagttttcatgctgcccatccaggtccaggccccgccccctgaggactcagactctggctcggactcagactatgagcactatgacttcagcgcccagcctcctgtggccctgaccaccttctacaattcccagcggcatcgggtcacagatgaggaggtccagcaaagcaggttccagatgccacccttggaggaaggacttgaagagttgcatgcctcccacatcccaactgccaaccctggacactgcattacagacccgccatccctgggccctcagtatcacccgaggagcaacagtgagtcgagcacctcttcaggggaggattactgcaatagtcccaaaagcaagctgcctccatggaacccccaggtgttttcttcagagaggagttccttcctggagcagcccccaaacttggagctggccggcacccagccagccttttcagcagggcccccggctgatgacagctccagcacctcatccggggagtggtaccagaacttccagccaccaccccagcccccttcggaggagcagtttggctgtccagggtcccccagccctcagcctgactccaccgacaacgatgactacgatgacatcagcgcagcctaggccggggccagccgaggctcctggggtggctctgaccctctggcctcctgctctacctactccctttcccctttcccaccctcccagctcacctccccatggagctgagaggcctcccttggagagatggaaggaaacgttataccttgtacccctcggtctccatccatcaagccaaacctgctgccacagccctcccccggccccagatagcagccccagggaggatgctgcctccaagaggtgtgagccctctgtctcggggatgaacaagcagagtctgggctacctcttgacagctggtggaggggagttggggagctggactggatgactctggaggccccttccaaacctcaagtgtccggcgctttgattgcctgagtttctgacacttcagggcccagaggtcctgcgaggggcagaactggacccccatgccagtgctgctgcaggagggcccatatactagggtctgctgagctgttgtcactgatcggtgggcgctgggggggtagggtagcacaccagctgtcccaggctttgctccgggtggtaactgcacttgggcagggaatatagccttcctgggcacaactagctgacaatgacaggttgactgtgtacccccaaccaaggagctggggcccaaggccagtcctgccccagagacactccaagtccgccagg

SEQ ID NO: 860 - DNA, 1929 bp; single-stranded, linear
  immediate source library: GENBANK
  immediate source clone: g1016272
ggaggcgcgggttgaaaagtctcgttccaagtttggagagagagagaagagcgcctcagacctcggtacccgcgagcggggaggaggcaggaaagaaggacgcggcgtctggggagcacccaggcagcaagacggggcccgggctttcgacagtggggagtgtgacgcgcttgggaaaggcaggagcgccagcggtcgggctgctcttggctaacgagaggagtccgaggcggcggcgaggggcgaacgacccgacgcaagatggcgagtaaagagatgtttgaagatactgtggaggagcgtgtcatcaatgaagaatataaaatctggaagaagaatacaccgtttctatatgacctggttatgacccatgctcttcagtggcccagtcttaccgttcagtggcttcctgaagtgactaaacctgaaggaaaagattatgcccttcattggctagtgctggggactcatacgtctgatgagcagaatcatctggtggttgctcgagtacatattcccaatgatgatgcacagtttgatgcttcccattgtgacagtgacaagggtgaatttggtggctttggttctgtaacaggaaaaattgaatgtgaaattaaaatcaatcacgaaggagaagtaaaccgtgctcgttacatgccgcagaatcctcacatcattgctacaaaaacaccatcttctgatgtgttggtttttgactatacaaaacaccctgctaaaccagacccaagtggagaatgtaatcctgatctcagattaagaggtcaccagaaggaaggctatggtctctcctggaattcaaatttgagtggacatctcctaagtgcatctgatgaccatactgtttgtctgtgggatataaacgcaggaccaaaagaaggcaaaattgtggatgctaaagccatctttactggccactcagctgttgtagaggatgtggcctggcacctgctgcacgagtcattgtttggatctgttgctgatgatcagaaacttatgatatgggacaccaggtccaataccacctccaagccgagtcacttggtggatgcgcacactgccgaagtcaactgcctctcattcaatccctacagcgaatttattctagccaccggctctgcggataagaccgtagctttatgggatctgcgtaacttaaaattaaaactccataccttcgaatctcataaagatgaaattttccaggtccactggtctccacataatgaaactattctggcttcaagtggtactgaccgccgcctgaatgtgtgggatttaagtaaaattggggaagaacaatcagcagaagatgcagaagatgggcctccagaactcctgtttattcatggaggacacactgctaagatttcagattttagctggaaccccaatgagccttgggtcatttgctcagtgtctgaggataacatcatgcagatatggcaaatggctgaaaatatttacaatgatgaagagtcagatgtcacgacatccgaactggagggacaaggatcttaaacccaaagtacgagaaatgtttctgttgaatgtaatgctacatgaatgcttgatttatcaagcgccaaaaaggcattgtatagtaggaaatgtaagtggggtggcttatggcttctttatcctctgattctagcactttcaagtgagctgttgcgtactgtatcatattgtagctattagggaagagaagaatgttgcttaagaaagaacatcaccattgattttaaatacaagtagcagggtattgcctttgattcaactgttttaagtcctcattttctcaaactaagtgcttgctgttcccaaatatgcaagaataacttttacactttttccttccaacacttcttgattggctttgcagaaataaagttttaaaataaaaaaaaa

SEQ ID NO: 861 - DNA, 1328 bp; single-stranded, linear
  immediate source library: GENBANK
  immediate source clone: g1036804
ggcacgaggttgcggccttcctcgcgtcaccgccgggatgaagccgatcctactgcagggccatgagcggtccattacgcagattaagtataaccgcgaaggagacctcctctttactgtggccaaggaccctatcgtcaatgtatggtactctgtgaatggtgagaggctgggcacctacatgggccataccggagctgtgtggtgtgtggacgctgactgggacaccaagcatgtcctcactggctcagctgacaacagctgtcgtctctgggactgtgaaacaggaaagcagctggcccttctcaagaccaattcggctgtccggacctgcggttttgactttgggggcaacatcatcatgttctccacggacaagcagatgggctaccagtgctttgtgagcttttttgacctgcgggatccgagccagattgacaacaatgagccctacatgaagatcccttgcaatgactctaaaatcaccagtgctgtttggggacccctgggggagtgcatcatcgctggccatgagagtggagagctcaaccagtatagtgccaagtctggagaggtgttggtgaatgttaaggagcactcccggcagatcaacgacatccagttatccagggacatgaccatgtttgtgaccgcgtccaaggacaacacagccaagctttttgactccacaactcttgaacatcagaagactttccggacagaacgtcctgtcaactcagctgccctctcccccaactatgaccatgtggtcctgggcggtggtcaggaagccatggatgtaaccacaacctccaccaggattggcaagtttgaggccaggttcttccatttggcctttgaagaagagtttggaagagtcaagggtcactttggacctatcaacagtgttgccttccatcctgatggcaagagctacagcagcggcggcgaagatggttacgtccgtatccattacttcgacccacagtacttcgaatttgagtttgaggcttaagaagctggatctcctgccgggcgtggtggctcatgcctgtaatcccaccacttttttttaaggcaggcggatcacctgaggtcaggagtttaagaccagcctgaccaacatggagaaactcgtctctactaaaaatacaaaaatacaaaaattagccaggcatggtggcacacgcctatagtcccagctactcaggaggctgaggcaggagaatcacttgaacccaggaggcataggttgcagtgagctgagatcacgtcattgcactccatcctgagccacaagagcaaaactccgtctcaaaaaaaaaaaa

SEQ ID NO: 862 - DNA, 3620 bp; single-stranded, linear
  immediate source library: GENBANK
  immediate source clone: g1039418
aattcggcacgaggtgggactttcctctcgctgcctcccggctctgcccgcccttcgaaagtccagggtccctgcccgctaggcaagttgcactcatggcacctccaagtgaagagacgcccctgatccctcagcgttcatgcagcctcttgtccacggaggctggtgccctgcatgtgctgctgcccgctcggggccccgggcccccccagcgcctatctttctcctttggggaccacttggctgaggacctgtgcgtgcaggctgccaaggccagcggcatcctgcctgtgtaccactccctctttgctctggccacggaggacctgtcctgctggttccccccgagccacatcttctccgtggaggatgccagcacccaagtcctgctgtacaggattcgcttttacttccccaattggtttgggctggagaagtgccaccgcttcgggctacgcaaggatttggccagtgctatccttgacctgccagtcctggagcacctctttgcccagcaccgcagtgacctggtgagtgggcgcctccccgtgggcctcagtctcaaggagcagggtgagtgtctcagcctggccgtgttggacctggcccggatggcgcgagagcaggcccagcggccgggagagctgctgaagactgtcagctacaaggcctgcctacccccaagcctgcgcgacctgatccagggcctgagcttcgtgacgcggaggcgtattcggaggacggtgcgcagagccctgcgccgcgtggccgcctgccaggcagaccggcactcgctcatggccaagtacatcatggacctggagcggctggatccagccggggccgccgagaccttccacgtgggcctccctggggcccttggtggccacgacgggctggggctgctccgcgtggctggtgacggcggcatcgcctggacccagggagaacaggaggtcctccagcccttctgcgactttccagaaatcgtagacattagcatcaagcaggccccgcgcgttggcccggccggagagcaccgcctggtcactgttaccaggacagacaaccagattttagaggccgagttcccagggctgcccgaggctctgtcgttcgtggcgctcgtggacggctacttccggctgaccacggactcccagcacttcttctgcaaggaggtggcaccgccgaggctgctggaggaagtggccgagcagtgccacggccccatcactctggactttgccatcaacaagctcaagactgggggctcacgtcctggctcctatgttctccgccgcagcccccaggactttgacagcttcctcctcactgtctgtgtccagaacccccttggtcctgattataagggctgcctcatccggcgcagccccacaggaaccttccttctggttggcctcagccgaccccacagcagtcttcgagagctcctggcaacctgctgggatggggggctgcacgtagatggggtggcagtgaccctcacttcctgctgtatccccagacccaaagaaaagtccaacctgatcgtggtccagagaggtcacagcccacccacatcatccttggttcagccccaatcccaataccagctgagtcagatgacatttcacaagatccctgctgacagcctggagtggcatgagaacctgggccatgggtccttcaccaagatttaccggggctgtcgccatgaggtggtggatggggaggcccgaaagacagaggtgctgctgaaggtcatggatgccaagcacaagaactgcatggagtcattcctggaagcagcgagcttgatgagccaagtgtcgtaccggcatctcgtgctgctccacggcgtgtgcatggctggagacagcaccatggtgcaggaatttgtacacctgggggccatagacatatatctgcgaaaacgtggccacctggtgccagccagctggaagctgcaggtggtcaaacagctggcctacgccctcaactatctggaggacaaaggcctgccccatggcaatgtctctgcccggaaggtgctcctggctcgggagggggctgatgggagcccgcccttcatcaagctgagtgaccctggggtcagccccgctgtgttaagcctggagatgctcaccgacaggatcccctgggtggcccccgagtgtctccgggaggcgcagacacttagcttggaagctgacaagtggggcttcggcgccacggtctgggaagtgtttagtggcgtcaccatgcccatcagtgccctggatcctgctaagaaactccaattttatgaggaccggcagcagctgccggcccccaagtggacagagctggccctgctgattcaacagtgcatggcctatgagccggtccagaggccctccttccgagccgtcattcgtgacctcaatagcctcatctcttcagactatgagctcctctcagaccccacacctggtgccctggcacctcgtgatgggctgtggaatggtgcccagctctatgcctgccaagaccccacgatcttcgaggagagacacctcaagtacatctcacagctgggcaagggcaactttggcagcgtggagctgtgccgctatgacccgctaggcgacaatacaggtgccctggtggccgtgaaacagctgcagcacagcgggccagaccagcagagggactttcagcgggagattcagatcctcaaagcactgcacagtgatttcattgtcaagtatcgtggtgtcagctatggcccgggccgccagagcctgcggctggtcatggagtacctgcccagcggctgcttgcgcgacttcctgcagcggcaccgcgcgcgcctcgatgccagccgcctccttctctattcctcgcagatctgcaagggcatggagtacctgggctcccgccgctgcgtgcaccgcgacctggccgcccgaaacatcctcgtggagagcgaggcacacgtcaagatcgctgacttcggcctagctaagctgctgccgcttgacaaagactactacgtggtccgcgagccaggccagagccccattttctggtatgcccccgaatccctctcggacaacatcttctctcgccagtcagacgtctggagcttcggggtcgtcctgtacgagctcttcacctactgcgacaaaagctgcagcccctcggccgagttcctgcggatgatgggatgtgagcgggatgtccccgccctctgccgcctcttggaactgctggaggagggccagaggctgccggcgcctcctgcctgccctgctgaggtgagcgccgcagggctagcctcagtttcccagtctgtagattgggccggggtctcgggcaagccagctggcgcctgagtctctgtactgagaagaaaggctagagtgtgaggccgatgaggatcctggcccccacttggctactctctcactgtggcaagtcagagcactttcagagcctcagtttacccttttccaaaatgagaatagtaatgccttatagggtgagggaagattagactcctgttcacctgtgcctatgagggctcagctcaaagccgagcacacagtcgatgctccataaatggtggtgacgtt

SEQ ID NO: 863 - DNA, 558 bp; single-stranded, linear
  immediate source library: GENBANK
  immediate source clone: g1039420
gtgagttgctacagtggctggagagacgacatctgctccatgggctggtggccgacagtaatctcacgctgggacctggcctgcagcccctgccccagacctctcaccatcaccgccaccaccgtgcagctgccaccaaccctgcacgctactgctgcctcagtggctgtacccaacaagacctgctgaccctctgtccctactgattcctccttgggtgcagcctcagagtggcctgaggcccagagggtctggtctggtgagctcctgaggccacacagcaccataaagtctcgcatctacaggcctttgattacctcctgggatgggtgctcactatctaccccagaccaatgccacctgcagcctgtggagtcaactgcagaataaatcacaccctagccctggcttggaggatccccgctttcacagatgctggacactgacagccaaatgtcctcactccaggggagccccagacgctccgctccctgcatgtgtaacaccccttcttgctgtctcttagtaaataaacgacccaaaaaaaaaaaaaaaaaa

SEQ ID NO: 864 - DNA, 888 bp; single-stranded, linear
  immediate source library: GENBANK
  immediate source clone: g1045058
gcatggcggccaccaggtgcctgcgctggggcctgagccgagccggagtctggctgctcccaccgcccgcacggtgcccacgccgggcgctgcacaagcagaaagacggcactgagttcaagagcatctacagcctggacaagctctaccccgaatctcagggctcggacaccgcctggagggtcccgaatggtgcaaagcaagccgacagtgacatccctctagatcgcttgacaatatcttattgtcggagtagtggtcctggggggcagaatgtgaacaaagtgaattccaaggcagaagtcaggttccatttggcaactgccgagtggatcgcggagcccgtgcggcagaagatagccatcacgcataaaaacaagatcaacaggttaggagagttgatccttacctctgagagcagccgctatcagttccggaatctggcagattgcctgcagaaaattcgagacatgatcactgaggccagccagacaccgaaggagccaacaaaagaagatgttaaacttcatagaatcaggatagaaaacatgaatcgggaaaggctgagacaaaagagaattcattctgctgtaaagacaagcaggagggtcgacatggactgaaatcaccctctgcagctgggagggctcttctgggcgtccgggcagctgcagctgagaggactttcacaccataaggagatttctgtttttctttttggctgttaatgcttgtctataacattggagccatcacaagaatgttcatttggaatgaaggctgcaggcactggttgcagacgtctttataggcagtcaccatgttgtcaaaccttaataatgcacctcatgtattagtcacaataaaaatcagaactcaaaaaaaaaa

SEQ ID NO: 865 - DNA, 1192 bp; single-stranded, linear
  immediate source library: GENBANK
  immediate source clone: g1048988
cgcgccccccagtcccgcacccgttcggcccaggctaagttagccctcaccatgccggtcaaaggaggcaccaagtgcatcaaatacctgctgttcggatttaacttcatcttctggcttgccgggattgctgtccttgccattggactatggctccgattcgactctcagaccaagagcatcttcgagcaagaaactaataataataattccagcttctacacaggagtctatattctgatcggagccggcgccctcatgatgctggtgggcttcctgggctgctgcggggctgtgcaggagtcccagtgcatgctgggactgttcttcggcttcctcttggtgatattcgccattgaaatagctgcggccatctggggatattcccacaaggatgaggtgattaaggaagtccaggagttttacaaggacacctacaacaagctgaaaaccaaggatgagccccagcgggaaacgctgaaagccatccactatgcgttgaactgctgtggtttggctgggggcgtggaacagtttatctcagacatctgccccaagaaggacgtactcgaaaccttcaccgtgaagtcctgtcctgatgccatcaaagaggtcttcgacaataaattccacatcatcggcgcagtgggcatcggcattgccgtggtcatgatatttggcatgatcttcagtatgatcttgtgctgtgctatccgcaggaaccgcgagatggtctagagtcagcttacatccctgagcaggaaagtttacccatgaagattggtgggattttttgtttgtttgttttgttttgtttgttgtttgttgtttgtttttttgccactaattttagtattcattctgcattgctagataaaagctgaagttactttatgtttgtcttttaatgcttcattcaatattgacatttgtagttgagcggggggtttggtttgcttggtttatatttttcagttgtttgtttttgcttgttatattaagcagaaatcctgcaatgaaaggtactatatttgctagactctagacaagatattgtacataaaagaatttttttgtctttaaatagatacaaatgtctatcaactttaatcaagttgtaacttatattgaagacaatttgatacataataaaaaattatgacaatgaaaaaaaaaaaaaaaaaaaaaaagg

SEQ ID NO: 866 - DNA, 1168 bp; single-stranded, linear
  immediate source library: GENBANK
  immediate source clone: g1049069
gagaaagcgcagagaaggacgggaccccgtctgaggtctggcagtcagagacagccgggcgcccacggcccgagcgcccacggcagcaccatgcccgcactcctggagcgccccaagctttccaacgccatggccagggcgctgcaccggcacattatgatggagcgggagcgcaagcggcaggaggaagaagaggtggataagatgatggaacagaagatgaaggaagaacaggagagaaggaagaaaaaggagatggaagagagaatgtcattagaggagaccaaggaacaaattctgaagttggaggagaagcttttggctctacaggaagagaagcaccagcttttcctgcagctcaagaaagttttacatgaggaagaaaaacggaggcgaaaggaacagagtgacctgaccaccctaacatcagctgcataccagcagagcctgactgttcacacaggaactcatctcctcagcatgcaggggagccctggaggacacaatcgcccaggcaccctcatggcagctgacagagccaaacaaatgtttggaccccaagtgcttacgacccggcactacgtgggctcagcagctgcttttgcagggacaccagagcatggacaattccaaggcagtcctggtggtgcctatgggactgctcagcccccacctcactatgggcccacacagccagcttatagtcctagtcagcagctcagagctccttcggcattccctgcagtgcagtacctatctcagccacagccacagccctatgctgtgcatggccactttcagcccactcagacaggtttcctccagcctggtggtgccctgtccttgcaaaagcagatggaacatgctaaccagcagactggcttctccgactcatcctctctgcgccccatgcacccccaggctctgcatccagcccctggactccttgcttccccccagctccctgtgcagatgcagccagcaggaaagtcgggctttgcagctaccagccaacctggccctcggctccccttcatccaacacagccagaacccgcgattctaccacaagtgaccatcagattatatcttcaacaccacaccccccaccccatcgtgggtgagggtatcccctgtgtgtcccaggccaataaaatctacctgccaat

SEQ ID NO: 867 - DNA, 1015 bp; single-stranded, linear
  immediate source library: GENBANK
  immediate source clone: g1049089
gcgtggaggtcgacgactccgtcgcagactacggacctgtctgggtctcagccgccaaagaccccgtccggtaggtgagtggctcactttgagggcaagccttctcggatcgaggcttcttcatggccgctcagatcgtgagcggccggggctgctctctttgcggaggatggcgtctaatgagcgcagttgattcgaggaagtactagccggacatcatgagtggctgtcgggtattcatcgggagactaaatccagcggccagggagaaggacgtggaaagattcttcaagggatatggacggataagagatattgatctgaaaagaggctttggttttgtggaatttgaggatccaagggatgcagatgatgctgtgtatgagcttgatggaaaagaactctgtagtgaaagggttactattgaacatgctagggctcggtcacgaggtggaagaggtagaggacgatactctgaccgttttagtagtcgcagacctcgaaatgatagacggtatgtgaagggtggatggctgcattgaacaattattgtaggggtagcatttaagattcaggagtcattagcagtgatgattttgggacctgccgtataatctgttcttctattcccacgttagccaattgttcttgatgaatctatatgagtcatagaacacaaatctattgacggaagtcattagaatggcttgtgatatctgatggcttgaacttgcccacagttgaacacaagtgctgtcattgcatttcttccattgtgaatacgaattttcttcctcagaaatgctccacctgtaagaacagaaaatcgtcttatagttgagaatttatcctcaagagtcagctggcaggtttgttgaaatacagttttgagttattttgatgtggctttttaaaaaagttaatgggtagctaatgttgtattgttttattaaaagtagttttaaattaatggatttaatggaattgtaattttaaacatttaattaaatgtaat

SEQ ID NO: 868 - DNA, 1846 bp; single-stranded, linear
  immediate source library: GENBANK
  immediate source clone: g1050526
gcagtgcggcggtcacaggctgagtgctgcggcgcgatccttgcttccctgagcgttggcccgggaggaaagaagatggtgctggatctggatttgtttcgggtggataaaggaggggacccagccctcatccgagagacgcaggagaagcgcttcaaggacccgggactagtggaccagctggtgaaggcagacagcgagtggcgacgatgtagatttcgggcagacaacttgagcaagctgaagaacctatgcagcaagacaatcggagagaaaatgaagaaaaaagagccagtgggagatgatgagtctgtcccagagaatgtgctgagtttcgatgaccttactgcagacgctttagctaacctgaaagtctcacaaatcaaaaaagtccgactcctcattgatgaagccatcctgaagtgtgacgcggagcggataaagttggaagcagagcggtttgagaacctccgagagattgggaaccttctgcacccttctgtacccatcagtaacgatgaggatgtggacaacaaagtagagaggatttggggcgattgtacagtcaggaagaagtactctcatgtggacctggtggtgatggtagatggctttgaaggcgaaaagggggccgtggtggctgggagtcgagggtacttcttgaagggggtcctggtgttcctggaacaggctctcatccagtatgcccttcgcaccttgggaagtcggggctacattcccatttataccccctttttcatgaggaaggaggtcatgcaggaggtggcacagctcagccagtttgatgaagaactttataaggtgattggcaaaggcagtgaaaagtctgatgacaactcctatgatgagaagtacctgattgccacctcagagcagcccattgctgccctgcaccgggatgagtggctccggccggaggacctgcccatcaagtatgctggcctgtctacctgcttccgtcaggaggtgggctcccatggccgtgacacccgtggcatcttccgagtccatcagtttgagaagattgaacagtttgtgtactcatcaccccatgacaacaagtcatgggagatgtttgaagagatgattaccaccgcagaggagttctaccagtccctggggattccttaccacattgtgaatattgtctcaggttctttgaatcatgctgccagtaagaagcttgacctggaggcctggtttccgggctcaggagccttccgtgagttggtctcctgttctaattgcacggattaccaggctcgccggcttcgaatccgatatgggcaaaccaagaagatgatggacaaggtggagtttgtccatatgctcaatgctaccatgtgcgccactacccgtaccatctgcgccatcctggagaactaccagacagagaagggcatcactgtgcctgagaaattgaaggagttcatgccgccaggactgcaagaactgatcccctttgtgaagcctgcgcccattgagcaggagccatcaaagaagcagaagaagcaacatgagggcagcaaaaagaaagcagcagcaagagacgtcaccctagaaaacaggctgcagaacatggaggtcaccgatgcttgaacattcctgcctccctatttgccaggctttcatttctgtctgctgagatctcagagcctgcccaacagcagggaagccaagcacccattcatccccctgcccccatctgactgcgtagctgagaggggaacagtgccatgtaccacacagatgttcctgtctcctcgcatgggcatagggacccatcattgatgactgatgaaaccatgtaataaagcatctctgg

SEQ ID NO: 869 - DNA, 1633 bp; single-stranded, linear
  immediate source library: GENBANK
  immediate source clone: g1050957
ctgagctgcatcatggtgcggtctgtggcctgggcaggtttcatggtcctgctgatgatcccatggggctctgctgcaaaactggtctgctacttcaccaactgggcccagtacagacagggggaggctcgcttcctgcccaaggacttggaccccagcctttgcacccacctcatctacgccttcgctggcatgaccaaccaccagctgagcaccactgagtggaatgacgagactctctaccaggagttcaatggcctgaagaagatgaatcccaagctgaagaccctgttagccatcggaggctggaatttcggcactcagaagttcacagatatggtagccacggccaacaaccgtcagacctttgtcaactcggccatcaggtttctgcgcaaatacagctttgacggccttgaccttgactgggagtacccaggaagccaggggagccctgccgtagacaaggagcgcttcacaaccctggtacaggacttggccaatgccttccagcaggaagcccagacctcagggaaggaacgccttcttctgagtgcagcggttccagctgggcagacctatgtggatgctggatacgaggtggacaaaatcgcccagaacctggattttgtcaaccttatggcctacgacttccatggctcttgggagaaggtcacgggacataacagccccctctacaagaggcaagaagagagtggtgcagcagccagcctcaacgtggatgctgctgtgcaacagtggctgcagaaggggacccctgccagcaagctgatccttggcatgcctacctacggacgctccttcacactggcctcctcatcagacaccagagtgggggccccagccacagggtctggcactccaggccccttcaccaaggaaggagggatgctggcctactatgaagtctgctcctggaagggggccaccaaacagagaatccaggatcagaaggtgccctacatcttccgggacaaccagtgggtgggctttgatgatgtggagagcttcaaaaccaaggtcagctatctgaagcagaagggactgggcggggccatggtctgggcactggacttagatgactttgccggcttctcctgcaaccagggccgataccccctcatccagacgctacggcaggaactgagtcttccatacttgccttcaggcaccccagagcttgaagttccaaaaccaggtcagccctctgaacctgagcatggccccagccctggacaagacacgttctgccagggcaaagctgatgggctctatcccaatcctcgggaacggtccagcttctacagctgtgcagcggggcggctgttccagcaaagctgcccgacaggcctggtgttcagcaactcctgcaaatgctgcacctggaattgagtcgtaaagcccctccagtccagctttgaggctgggcccaggatcactctacagcctgcctcctgggttttcctgggggccgcaatctggctcctgcaggcctttctgtggtcttcctttatccaggctttctgctctcagccttgccttccttttttctgggtctcctgggctgcccctttcacttgcaaaataaatctttggtttgtgcccctcttca

SEQ ID NO: 870 - DNA, 2169 bp; single-stranded, linear
  immediate source library: GENBANK
  immediate source clone: g1060913
gctcgagccagcggcgcccggagagattcggagatgcaggcggctcggatggccgcgagcttggggcggcagctgctgaggctcgggggcggaagctcgcggctcacggcgctcctggggcagccccggcccggccctgcccggcggccctatgccgggggtgccgctcagctggctctggacaagtcagattcccacccctctgacgctctgaccaggaaaaaaccggccaaggcggaatctaagtcctttgctgtgggaatgttcaaaggccagctcaccacagatcaggtgttcccatacccgtccgtgctcaacgaagagcagacacagtttcttaaagagctggtggagcctgtgtcccgtttcttcgaggaagtgaacgatcccgccaagaatgacgctctggagatggtggaggagaccacttggcagggcctcaaggagctgggggcctttggtctgcaagtgcccagtgagctgggtggtgtgggcctttgcaacacccagtacgcccgtttggtggagatcgtgggcatgcatgaccttggcgtgggcattaccctgggggcccatcagagcatcggtttcaaaggcatcctgctctttggcacaaaggcccagaaagaaaaatacctccccaagctggcatctggggagactgtggccgctttctgtctaaccgagccctcaagcgggtcagatgcagcctccatccgaacctctgctgtgcccagcccctgtggaaaatactataccctcaatggaagcaagctttggatcagtaatgggggcctagcagacatcttcacggtctttgccaagacaccagttacagatccagccacaggagccgtgaaggagaagatcacagcttttgtggtggagaggggcttcgggggcattacccatgggccccctgagaagaagatgggcatcaaggcttcaaacacagcagaggtgttctttgatggagtacgggtgccatcggagaacgtgctgggtgaggttgggagtggcttcaaggttgccatgcacatcctcaacaatggaaggtttggcatggctgcggccctggcaggtaccatgagaggcatcattgctaaggcggtagatcatgccactaatcgtacccagtttggggagaaaattcacaactttgggctgatccaggagaagctggcacggatggttatgctgcagtatgtaactgagtccatggcttacatggtgagtgctaacatggaccagggagccacggacttccagatagaggccgccatcagcaaaatctttggctcggaggcagcctggaaggtgacagatgaatgcatccaaatcatggggggtatgggcttcatgaaggaacctggagtagagcgtgtgctccgagatcttcgcatcttccggatctttgaggggacaaatgacattcttcggctgtttgtggctctgcagggctgtatggacaaaggaaaggagctctctgggcttggcagtgctctaaagaatccctttgggaatgctggcctcctgctaggagaggcaggcaaacagctgaggcggcgggcagggctgggcagcggcctgagtctcagcggacttgtccacccggagttgagtcggagtggcgagctggcagtacgggctctggagcagtttgccactgtggtggaggccaagctgataaaacacaagaaggggattgtcaatgaacagtttctgctgcagcggctggcagacggggccatcgacctctatgccatggtggtggttctctcgagggcctcaagatccctgagtgagggccaccccacggcccagcatgagaaaatgctctgtgacacctggtgtatcgaggctgcagctcggatccgagagggcatggccgccctgcagtctgacccctggcagcaagagctctaccgcaacttcaaaagcatctccaaggccttggtggagcggggtggtgtggtcaccagcaacccacttggcttctgaatactcccggccagggcctgtcccagttatgtgccttccctcaagccaaagccgaagcccctttccttaaggccctggtttgtcccgaaggcctagtgttcccagcactgtgcctgctctcaagagcacttactgcctcgcaaataaaatttctagccagtcaaaaaa

SEQ ID NO: 871 - DNA, 1489 bp; single-stranded, linear
  immediate source library: GENBANK
  immediate source clone: g1061145
cagtcgaccccggggcggcgggcgcgatggcggaggccgggccacaggcgccgccgcccccggggactccaagccggcacgaaaagagcctgggactgctcaccaccaagttcgtgtcccttctgcaggaggccaaggacggcgtgcttgacctcaagctggcagctgacaccctagctgtacgccagaagcggcggatttacgacattaccaatgttttggaaggtatcgggctaatcgagaaaaagtccaagaacagcatccagtggaagggtgtggggcctggctgcaatacccgggagattgctgacaaactgattgagctcaaggcagagatcgaggagctgcagcagcgggagcaagaactagaccagcacaaggtgtgggtgcagcagagcatccggaacgtcacagaggacgtgcagaacagctgtttggcctacgtcactcatgaggacatctgcagatgctttgctggagataccctcttggccatccgggccccatcaggcaccagcctggaggtgcccatcccagagggtctcaatgggcagaagaagtaccagattcacctgaagagtgtgagtggtcccattgaggttctgctggtgaacaaggaggcatggagctcaccccctgtggctgtgcctgtgccaccacctgaagatttgctccagagcccatctgctgtttctacacctccacctctgcccaagcctgccctagcccagtcccaggaagcctcacgtccaaatagtcctcagctcactcccactgctgtccctggcagtgcagaagtccagggaatggctggcccagcagctgagatcacagtgagtggcggccctgggactgatagcaaggacagtggtgagctcagttcactcccactgggcccaacaacactggacacccggccactgcagtcttctgccctgctggacagcagcagcagcagcagcagcagcagcagcagcagcagcaacagtaacagcagcagttcgtccggacccaacccttctacctcctttgagcccatcaaggcagaccccacaggtgttttggaactccccaaagagctgtcagaaatctttgatcccacacgagagtgcatgagctcggagctgctggaggagttgatgtcctcagaagtgtttgcccctctgcttcgtctttctccacccccgggagaccacgattatatctacaacctggacgagagtgaaggtgtctgtgacctctttgatgtgcctgttctcaacctctgactgacagggacatgccctgtgtggctgggacccagactgtctgacctgggggttgcctggggacctctcccacccgacccctacagagcttgagagccacagacgcctggcttctccggnattnccttaccgcacagttctggccacacgtcccgctcctgtgctggcacttctgtgctcgcagagcaggggaacaggactcagcccccatcaccgtggag

SEQ ID NO: 872 - DNA, 2174 bp; single-stranded, linear
  immediate source library: GENBANK
  immediate source clone: g1063261
tattttgtagacacatgtgtatggtaatgcgaggtgtacagaaaatgaacagcaaaactgtgaccagcacaatgttgggtgtgttccgggaggatccaaagactcgggaagagttcctgactctcattaggagctgagcttcattcagtgtgtgtgcgttggttgccgatcgtactgccagtagcattgtctgtctgtccggtcttgtttgtacattccattttcaattgttacagatgtgaactttattccttgtcactaattatatttaaaattatttctaggaagtcaaataaatataataaagggttgagccctctactttcttcttgccacctttttgtggcaatattaaagtgaactgctaatagtgtaagtacgtgcacaaaaccactgccagataaccagaggggcctgggaagggagaagaattagtgtatttttttcaaatagtacagtaatttgcctcataagcataggagcattgggaatgagagggaactgtgcccagtatactgttttttttcttcctccaataaaagtggtgtagtgccgaaagtgctaaaatatttagtgcggtattgctctgtgaattcaagttcaacagacttcactttggtcatgtttattaaaccaccagtgacatttaaaaatatatttttagcagtcgtaatgttagtcaccaagggaaggtggtggaatgtctatgtttttgattttactgtgagttaaaaaggcacatttctaccttctattgtttttaaattcaagaatagggaattagttcctggtgttgtttacgagtgtattctcgtgtcaacatacagggatttagacatttaactctctgtgccttgataagaatatcatttagagtgtagatacttttgcctttttaaaaaagccattattttatgagacttagtactcacactgcaaataactagtcagctcagttttaactttataggtttattgagtttcctttgtgtgatccatgtagatgcctcaaaatgtttcttcttcttcttttttttaatcttataagatatttttctaagtatttccagaaacatttgagagtgcccatcattttcaggtctgcagaaccatagcttccacgcacctgaacgagcacagaatgaactgacggtggaagacattatgagctgtgtccaacgttttaaccaaagcgtatcgtaccaacgatctgtgaaaatgcactggaagcttctggtcccggtttcctttgtggtctatgtgggtcttgtcctcattgtaactccgtatagatggtataggtattttaatcctggaagctgttgccttattaatgattatcttaaaatttcctccattggggcagcgtgggccaaattaaaacaaacaaaaccgcaactcctccacagaaacacaaacacagttattccatgaagtttagtatttggttgacatagtgctcttcaaattcatcccattaccctaaaagtaataactttgatgcttgctttaactttagtcccatctctgccactttgatgctatttgggttatgatggggcaagatggcagaggtattgggtttttttgtttttttccattcctctctacttctgtttcctagctttttctttctggagtttaagtacagtgatggttggcttgagtacctttttaaatctagcccagtataaacattagcctgcttaatatttagacatttataggtagaattctgagcactcaactcatgtttggcattttaaagtaaaaacaagtgtgacttcgaggaccaaagaaattgtcagctatacatttatctttatgaactcatttatattcctttttaatgactcgttgttctaacatttcctagaagtgttcttataaaggtctaatgtatccacaggctgttgtcttattagtaaatgcaaagtaatgactttgtctgttttactctagtctttagtacttcaaaattaccttttcatatccatgatcttgagtccatttgggggatttttaagaatttgatgtatttcaatacactgttcaaaattaaattgtttaattttatgtatgagtatgtatgttcctgaagttggtcctatttaaattattaaactattgtaactttgttcttgtgaaagttgtttctttttcaaccaccacta

SEQ ID NO: 873 - DNA, 1436 bp; single-stranded, linear
  immediate source library: GENBANK
  immediate source clone: g1066270
agtgtggtcaggcggctcggactgagcaggactttccttatcccagttgattgtgcagaatacactgcctgtcgcttgtcttctattcaccatggcttcttctgatatccaggtgaaagaactggagaagcgtgcctcaggccaggcttttgagctgattctcagccctcggtcaaaagaatctgttccagaattccccctttcccctccaaagaagaaggatctttccctggaggaaattcagaagaaattagaagctgcagaagaaagacgcaagtcccatgaagctgaggtcttgaagcagctggctgagaaacgagagcacgagaaagaagtgcttcagaaggcaatagaagagaacaacaacttcagtaaaatggcagaagagaaactgacccacaaaatggaagctaataaagagaaccgagaggcacaaatggctgccaaactggaacgtttgcgagagaaggataagcacattgaagaagtgcggaagaacaaagaatccaaagaccctgctgacgagactgaagctgactaatttgttctgagaactgactttctccccatccccttcctaaatatccaaagactgtactggccagtgtcattttattttttccctcctgacaaatattttagaagctaatgtaggactgtataggtagatccagatccagactgtaagatgttgttttaggggctaaaggggagaaactgaaagtgttttactctttttctaaagtgttggtctttctaatgtagctatttttcttgttgcatcttttctacttcagtacacttggtgtactgggttaatggctagtactgtattggctctgtgaaaacatatttgtgaaaagagtatgtagtggcttcttttgaactgttagatgctgaatatctgttcacttttcaatcccaattctgtcccaatcttaccagatgctactggacttgaatggttaataaaactgcacagtgctgttggtggcagtgacttcttttgagttaggttaataaatcaagccatagagcccctcctggttgatacttgttccagatggggcctttggggctggtagaaatacccaacgcacaaatgaccgcacgttctctgccccgtttcttgccccagtgtggtttgcattgtctccttccacaatgactgctttgtttggatgcctcagcccaggtcagctgttactttctttcagatgtttatttgcaaacaaccattttttgttctgtgtcccttttaaaaggcagattaaaagcacaagcgtgtttctagagaacagttgagagagaatctcaagattctacttggtggtttgcttgctctacgttacaggtggggcatgtcctcatcctttcctgccataaaagctatgacacgagaatcagaatattaataaaactttatgtactgctgt

SEQ ID NO: 874 - DNA, 737 bp; single-stranded, linear
  immediate source library: GENBANK
  immediate source clone: g1079557
ccagctcaagactttgctctccaccaggcagaagatgacagactgtgaatttggatatatttacaggctggctcaggactatctgcagtgcgtcctacagataccacaacctggatcaggtccaagcaaaacgtccagagtgctacaaaatgttgcgttctcagtccaaaaagaagtggaaaagaatctgaagtcatgcttggacaatgttaatgttgtgtccgtagacactgccagaacactattcaaccaagtgatggaaaaggagtttgaagacggcatcattaactggggaagaattgtaaccatatttgcatttgaaggtattctcatcaagaaacttctacgacagcaaattgccccggatgtggatacctataaggagatttcatattttgttgcggagttcataatgaataacacaggagaatggataaggcaaaacggaggctgggaaaatggctttgtaaagaagtttgaacctaaatctggctggatgacttttctagaagttacaggaaagatctgtgaaatgctatctctcctgaagcaatactgttgaccagaaaggacactccatattgtgaaaccggcctaatttttctgactgatatggaaacgattgccaacacatacttctacttttaaataaacaactttgatgatgtaacttgaccttccagagttatggaaattttgtccccatgtaatgaataaattgtatgtatttttctcta

SEQ ID NO: 875 - DNA, 966 bp; single-stranded, linear
  immediate source library: GENBANK
  immediate source clone: g1088447
ggcagtggaaccttcgggctcctgagcttcaggatggttcgtactaagacatggaccctgaagaagcactttgttggctatcctactaatagtgactttgagttgaagacagctgagctcccacccttaaaaaatggagaggtcctgcttgaagctttgttcctcaccgtggatccctacatgagagtggcagccaaaagattgaaggaaggtgatacaatgatggggcagcaagtggccaaagttgtggaaagtaaaaatgtagccctaccaaaaggaactattgtactggcttctccaggctggacaacgcactccatttctgatgggaaagatctggaaaagctgctgacagagtggccagacacaataccactgtctttggctctggggacagttggcatgccaggcctgactgcctactttggcctacttgaaatctgtggtgtgaagggtggagaaacagtgatggttaatgcagcagctggagctgtgggctcagtcgtggggcagattgcaaagctcaagggctgcaaagttgttggagcagtagggtctgatgaaaaggttgcctaccttcaaaagcttggatttgatgtcgtctttaactacaagacggtagagtctttggaagaaaccttgaagaaagcgtctcctgatggttatgattgttattttgataatgtaggtggagagttttcaaacactgttatcggccagatgaagaaatttggaaggattgccatatgtggagccatctctacatataacagaaccggcccacttcccccaggcccacccccagagattgttatctatcaggagcttcgcatggaagcttttgtcgtctaccgctggcaaggagatgcccgccaaaaagctctgaaggacttgctgaaatgggtcttagagggtaaaatccagtacaaggaatatatcattgaaggatttgaaaacatgccccgg

SEQ ID NO: 876 - DNA, 1297 bp; single-stranded, linear
  immediate source library: GENBANK
  immediate source clone: g1101785
cctgccccgcgcccagggatcctccagctcctttcgcccgcgccctccgttcgctccggacaccatggacaagttttggtggcacgcagcctggggactctgcctcgtgccgctgagcctggcgcagatcgatttgaatatgacctgccgctttgcaggtgtattccacgtggagaaaaatggtcgctacagcatctctcggacggaggccgctgacctctgcaaggctttcaatagcaccttgcccacaatggcccagatggagaaagctctgagcatcggatttgagacctgcaggtatgggttcatagaagggcacgtggtgattccccggatccaccccaactccatctgtgcagcaaacaacacaggggtgtacatcctcacatccaacacctcccagtatgacacatattgcttcaatgcttcagctccacctgaagaagattgtacatcagtcacagacctgcccaatgcctttgatggaccaattaccataactattgttaaccgtgatggcacccgctatgtccagaaaggagaatacagaacgaatcctgaagacatctaccccagcaaccctactgatgatgacgtgagcagcggctcctccagtgaaaggagcagcacttcaggaggttacatcttttacaccttttctactgtacaccccatcccagacgaagacagtccctggatcaccgacagcacagacagaatccctgctaccagagaccaagacacattccaccccagtggggggtcccataccactcatggatctgaatcagatggacactcacatgggagtcaagaaggtggagcaaacacaacctctggtcctataaggacaccccaaattccagaatggctgatcatcttggcatccctcttggccttggctttgattcttgcagtttgcattgcagtcaacagtcgaagaaggtgtgggcagaagaaaaagctagtgatcaacagtggcaatggagctgtggaggacagaaagccaagtggactcaacggagaggccagcaagtctcaggaaatggtgcatttggtgaacaaggagtcgtcagaaactccagaccagtttatgacagctgatgagacaaggaacctgcagaatgtggacatgaagattggggtgtaacacctacaccattatcttggaaagaaacaaccgttggaaacataaccattacagggagctgggacacttaacagatgcaatgtgctactgattgtttcattgcgaatcttttttagataaaatttttactttaaaaaaaaaaaaaaa

SEQ ID NO: 877 - DNA, 1256 bp; single-stranded, linear
  immediate source library: GENBANK
  immediate source clone: g1101910
ggcacgagggagagcagcgcacgcgggtgcaccgcggccgcgccccgggagggctgttcgggccagcgcccgccggctgctccgcgctgacagcgccgggctggggcggggcggggggctttgcaggccgccagtgtcgacatgctgctggaggaggttcgcgccggcgaccggctgagtggggcggcggcccggggcgacgtgcaggaggtgcgccgccttctgcaccgcgagctggtgcatcccgacgccctcaaccgcttcggcaagacggcgctgcaggtcatgatgtttggcagcaccgccatcgccctggagctgctgaagcaaggtgccagccccaatgtccaggacacctccggtaccagtccagtccatgacgcagcccgcactggattcctggacaccctgaaggtcctagtggagcacggggctgatgtcaacgtgcctgatggcaccggggcacttccaatccatctggcagttcaagagggtcacactgctgtggtcagctttctggcagctgaatctgatctccatcgcagggacgccaggggtctcacacccttggagctggcactgcagagaggggctcaggacctcgtggacatcctgcagggccacatggtggccccgctgtgatctggggtcaccctctccagcaagagaaccccgtggggttatgtatcagaagagaggggaagaaacactttctcttcttgtttctcctgcccactgctgcagtaggggaggagcacagtttgtggcttataggtgttggttttgggggtgtgagtgtttgggggacgtttctcatttgtttttctcactccttttggtgtgttggacagagaagggctcctgcaggccacagccacctaaacggttcagtttcttctgcgcctcaggctgctggggcctcagacgagacccaagggcagagcatttaagagtgaagtcatgacctccagggagcctagaagctggtggcccttgcccggcctgtgctcagagacctgaagtgtgcacgttgcttcaggcatggggggtggggggagcgtcccaaatcaataagaaggtagaatgagttatgagttattcatattctgttggaagcttgttttccagtctcttgtacagcgttttaaaagaaatggattctatttattatgctttattggaaaaaatgttgtaataatttaatgtttttacccattaaattaagacttgtgcatgatccaaaaaaaaaaaaaaaa

SEQ ID NO: 878 - DNA, 1587 bp; single-stranded, linear
  immediate source library: GENBANK
  immediate source clone: g1107697
tggcactaggggcagccactcagcccttcgagctgtaggggaggcgctgcgcccccggccccagccgatcgggggctcctggcgctactgccctccagagtccctcctgccgtctgacttgagtccctgctgctgcagtgcacgcccccctttcggcagccagggtggggcccagacccaacctggcccctcctgcccccaccccgcctttgggtcgctgacccccaggctgtggtgagggtctgagagctggtaccacggagcctgggcaacctcctccgcccacccatgcccaccccgcatgaggctgagaagcagatcacagggccagaggaggcggaccggcccccttcaatgtccagtcatgatacagcctctccagcggcccccagccgcaacccctgctgcctgtgctggtgctgctgctgtagctgctcctggaaccaagagcggcggcgcgcgtggcaggcctcccgggagagcaagctgcagcccctccccagctgtgaagtatgtgccacgccaagtcctgaggaggtgcagagctgggcgcagtcttttgacaagctgatgcacagcccagcgggacgcagcgtgttccgggcgttcctgcggacagagtacagcgaggagaacatgctcttctggttggcctgcgaggagctgaaggccgaggccaaccagcatgtggtagacgagaaggcgaggctcatctacgaggactacgtatccatcctgtcccccaaggaggtgagcctggactcccgtgtgcgggagggcatcaacaagaagatgcaggagccgtccgcacacacgttcgacgacgcgcagctgcagatctacacgctcatgcaccgggactcctacccccgcttcctcagctctcccacctaccgtgccctgctgctgcaggggccatcacagtcctcctccgaggcctaggccgcccccagcagcacagaccccgccgcctcctacggccgactctgggttcccttcaggtgttggtgtcggcagggctgtcagggcacatgcctggccggctggggtccccacccgcggagacggtcctagacccagtggggagtgctgtgtctcctgggtctgcccacccgtggccaagcaggaactccaggtgcagggcgggcctccaggtgcagggcgggccagaagccccctcatcggcccgcagctggctggcccagtgctcctggctgggggctcttgcgtggtgagagtaggggtccccccaggagccatgctggacccatgagcctcgctggggcctcctccccaggcagccaatgggccccagacaagcctttggtggggaacagaacctccgcatcgtgtagttttgtgacataaggagacctcctacttgagctgtctgtaccccagaatcaaacacagaactcagaaccagatttaggccctcagaatcctgcactcaaggtggcaggacccaatttctgttttatatgttcatgaactttaaacctggaaacatgtccttactaggtgttttatcaaaaaaaagttttttattattgaagatatttttaaagcaaaaaaaaaaaaaaaaaa

SEQ ID NO: 879 - DNA, 6363 bp; single-stranded, linear
  immediate source library: GENBANK
  immediate source clone: g1109791
cggccagcctccagacgttgccccatctgacgctcggctcgaggcctctctgtgagggaccggggggccatccccctccagggcggagatcggaggtcgctgccaagcatggcgcccacctggggccctggcatggtgtctgtggttggtcccatgggcctccttgtggtcctgctcgttggaggctgtgcagcagaagagccccccaggtttatcaaagaacccaaggaccagatcggcgtgtcggggggtgtggcctctttcgtgtgtcaggccacgggtgaccccaagccacgagtgacctggaacaagaagggcaagaaggtcaactctcagcgctttgagacgattgagtttgatgagagtgccggggcagtgctgaggatccagccgctgaggacaccgcgggatgaaaacgtgtacgagtgtgtggcccagaactcggttggggagatcacagtccatgccaagcttactgtcctccgagaggaccagctgccctctggcttccccaacatcgacatgggcccacagttgaaggtggtggagcggacacggacagccaccatgctctgtgcagccagcggcaaccctgaccctgagatcacctggttcaaggacttcctgcctgtggatcctagtgccagcaatggacgcatcaaacagctgcgatcagaaacctttgaaagcactccgattcgaggagccctgcagattgaaagcagtgaggaaaccgaccagggcaaatatgagtgtgtggccaccaacagcgccggcgtgcgctactcctcacctgccaacctctacgtgcgagagcttcgagaagtccgccgcgtggccccgcgcttctccatcctgcccatgagccacgagatcatgccagggggcaacgtgaacatcacctgcgtggccgtgggctcgcccatgccatacgtgaagtggatgcagggggccgaggacctgacccccgaggatgacatgcccgtgggtcggaacgtgctggaactcacagatgtcaaggactcggccaactacacctgcgtggccatgtccagcctgggcgtcattgaggcggttgctcagatcacggtgaaatctctccccaaagctcccgggactcccatggtgactgagaacacagccaccagcatcaccatcacgtgggactcgggcaacccagatcctgtgtcctattacgtcatcgaatataaatccaagagccaagacgggccgtatcagattaaagaggacatcaccaccacacgttacagcatcggcggcctgagccccaactcggagtacgagatctgggtgtcggccgtcaactccatcggccaggggccccccagcgagtccgtggtcacccgcacaggcgagcaggccccggccagcgcgccgcggaacgtgcaagcccggatgctcagcgcgaccaccatgattgtgcagtgggaggagccggtggagcccaacggcctgatccgcggctaccgcgtctactacaccatggaaccggagcaccccgtgggcaactggcagaagcacaacgtggacgacagcctgctgaccaccgtgggcagcctgctggaggacgagacctacaccgtgcgggtgctcgccttcacctccgtcggcgacgggcccctctcggaccccatccaggtcaagacgcagcagggagtgccgggccagcccatgaacctgcgggccgaggccaggtcggagaccagcatcacgctgtcctggagccccccgcggcaggagagtatcatcaagtacgagctcctcttccgggaaggcgaccatggccgggaggtgggaaggaccttcgacccgacgacttcctacgtggtggaggacctgaagcccaacacggagtacgccttccgcctggccgcccgctcgccgcagggcctgggcgccttcacccccgtggtgcggcagcgcacgctgcagtccaaaccgtcagccccccctcaagacgttaaatgtgtcagcgtgcgctccacggccattttggtaagttggcgcccgccgccgccggaaacgcacaacggggccctggtgggctacagcgtccgctaccgaccgctgggctcagaggacccggaacccaaggaggtgaacggcatccccccgaccaccactcagatcctgctggaggccttggagaagtggacccagtaccgcatcacgactgtcgctcacacagaggtgggaccagggcccgagagctcacccgtggtcgtccgcaccgacgaggatgtgcccagcgcgccgccgcggaaggtggaggcggaggcgctcaacgccacggccatccgcgtgctgtggctcggccctgtgcccggccggcagcacggccagatccgcggctaccaggtccactacgtgcgcatggagggcgccgagggccgcgggccgccgcgcatcaaggacgtcatgctggccgatgcccagtgggagacggatgacacggccgaatatgagatggtcatcacaaacttgcagcctgagaccgcgtactccatcacggtagccgcctacaccatgaagggcgatggcgctcgcagcaaacccaaggtggttgtgaccaagggagcagtgttgggccgcccaaccctgtcggtgcagcagacccccgagggcagcctgctggcacgctgggagcccccggctggcaccgcggaggaccaggtgctgggctaccgcctgcagtttggccgtgaggactcgacgcccctggccaccctggagttcccgccctccgaggaccgctacacggcatcaggcgtgcacaagggggccacgtatgtgttccggcttgcggcccggagccggggcggcctgggcgaggaggcagccgaggtcctgagcatcccggaggacacgccccgtggccacccgcagattttggaagccgccggcaacgcctcggccgggaccgtccttctccgctggctgccacccgtgcccgccgagcgcaacggggccatcgtcaaatacacggtggccgtgcgtgaggccggtgccctgggccctgcccgagagactgagctgccggcagcggctgagccgggcgcggagaacgccgtcacgctgcagggcctgaagcccgacacggcctatgacctccaagtgcgagcccacacgcgccggggccctggccccttcagcccccccgtccgctaccggacgttcctgcgggaccaagtctcgcccaagaacttcaaggtgaaaatgatcatgaagacatcagttctgctcagctgggagttccctgacaactacaactcacccacaccctacaagatccagtacaatgggctcacactggatgtggatggccgtaccaccaagaagctcatcacgcacctcaagccccacaccttctacaactttgtgctgaccaatcgcggcagcagcctgggcggcctccagcagacggtcaccgcctggactgccttcaacctgctcaacggcaagcccagcgtcgcccccaagcctgatgctgacggcttcatcatggtgtatcttcctgacggccagagccccgtgcctgtccagagctatttcattgtgatggtgccactgcgcaagtctcgtggaggccaattcctgaccccgctgggtagcccagaggacatggatctggaagagctcatccaggacatctcacggctacagaggcgcaccgtgcggcactcgcgtcagctggaggtgccccggccctatattgcagctcgcttctctgtgctgccacccacgttccatcccggcgaccagaagcagtatggcggcttcgataaccggggcctggagcccggccaccgctatgtcctcttcgtgcttgccgtgcttcagaagagcgagcctacctttgcagccagtcccttctcagaccccttccagctggataacccggacccccagcccatcgtggatggcgaggaggggcttatctgggtgatcgggcctgtgctggccgtggtcttcataatctgcattgtcattgctatcctgctctacaagaacaaacccgacagtaaacgcaaggactcagaaccccgcaccaaatgcctcctgaacaatgccgacctcgcccctcaccaccccaaggaccctgtggaaatgagacgcattaacttccagactccagattcaggcctcaggagccccctcagggagccggggtttcactttgaaagcatgcttagccacccgccaattcccatcgcagacatggcggagcacacggagcggctcaaggccaacgacagcctcaagctctcccaggagtatgagtccatcgaccctggacagcagttcacatgggaacattccaacctggaagtgaacaagccgaagaaccgctatgccaacgtcatcgcctatgaccacttccgtgtcatcctccagcccattgaaggcatcatgggcagtgattacatcaatgccaactatgtggacggctaccggcgtcagaacgcgtacattgccacgcaggggccgctgcctgagacctttggggacttctggcgtatggtgtgggagcagcggtcggcgaccatcgtcatgatgacgcggctggaggagaagtcacggatcaagtgtgatcagtattggcccaacagaggcacggagacctacggcttcatccaggtcacgttgctagataccatcgagctggccacattctgcgtcaggacattctctctgcacaagaatggctccagtgagaaacgcgaggtccgccagttccagtttacggcgtggccggaccatggcgtgcccgaatacccaacgcccttcctggctttcctgcggagagtcaagacctgcaacccgccagatgccggccccatcgtggttcactgcagtgccggtgtgggccgcacaggctgctttatcgtcatcgacgccatgcttgagcggatcaagccagagaagacagtcgatgtctatggccacgtgacgctcatgaggtcccagcgcaactacatggtgcagacggaggaccagtacagcttcatccacgaggccctgctggaggccgtgggctgtggcaacacagaagtgcccgcacgcagcctctatgcctacatccagaagctggcccaggtggagcctggcgaacacgtcactggcatggaactcgagttcaagcggctggctaactccaaggcccacacgtcacgcttcatcagtgccaatctgccttgtaacaagttcaagaaccgcctggtgaacatcatgccctatgagagcacacgggtctgtctgcaacccatccggggtgtggagggctctgactacatcaacgccagcttcattgatggctataggcagcagaaggcctacatcgcgacacaggggccgctggcggagaccacggaagacttctggcgcatgctgtgggagaacaattcgacgatcgtggtgatgctgaccaagctgcgggagatgggccgggagaagtgtcaccagtactggccggccgagcgctctgcccgctaccagtactttgtggtagatccgatggcagaatacaacatgcctcagtatatcctgcgagagttcaaggtcacagatgcccgggatggccagtcccggactgtccggcagttccagttcacagactggccggaacagggtgtgccaaagtcgggggagggcttcatcgacttcattggccaagtgcataagactaaggagcagtttggccaggacggccccatctctgtccactgcagtgccggcgtgggcaggacgggcgtcttcatcacgcttagcatcgtgctggagcggatgcggtatgaaggcgtggtggacatctttcagacggtgaagatgctacgaacccagcggccggccatggtgcagacagaggatgagtaccagttctgttaccaggcggcactggagtacctcggaagctttgaccactatgcaacctaaagccatggtcccccccaggcccgacaccactggccccggatgcctctgcccctcccgggcggacctcctgaggcctggacccccagtgggcagggcaggaggtggcagcggcagcagctgtgtttttctgcaccatttccgaggacgacgcatcccctcgagcccccccaccggccccggccgccccagcgacctccctggcaccggccgccgccttcaaatacttggcacattcctcctttccttccaattccaaaaccagattccggggtggggggtggggggatggtgagcaaataggagtgctccccagaaccagaggagggtggggcacagaccatagacggacccctcgtcctcccccagcggtggtagggggacccggggggctcctccccgctctgcacc

SEQ ID NO: 880 - DNA, 1488 bp; single-stranded, linear
  immediate source library: GENBANK
  immediate source clone: g1119216
cgcgacggctgagcaaggactctccagtcctcagtcaccttggacaaagaagtgtggatcctcagattccatcttttccaactccaaggtgccatggcagagaaggtgctggtaacaggtggggctggctacattggcagccacacggtgctggagctgctggaggctggctacttgcctgtggtcatcgataacttccataatgccttccgtggagggggctccctgcctgagagcctgcggcgggtccaggagctgacaggccgctctgtggagtttgaggagatggacattttggaccagggagccctacagcgtctcttcaaaaagtacagctttatggcggtcatccactttgcggggctcaaggccgtgggcgagtcggtgcagaagcctctggattattacagagttaacctgaccgggaccatccagcttctggagatcatgaaggcccacggggtgaagaacctggtgttcagcagctcagccactgtgtacgggaacccccagtacctgccccttgatgaggcccaccccacgggtggttgtaccaacccttacggcaagtccaagttcttcatcgaggaaatgatccgggacctgtgccaggcagacaagacttggaacgtagtgctgctgcgctatttcaaccccacaggtgcccatgcctctggctgcattggtgaggatccccagggcatacccaacaacctcatgccttatgtctcccaggtggcgatcgggcgacgggaggccctgaatgtctttggcaatgactatgacacagaggatggcacaggtgtccgggattacatccatgtcgtggatctggccaagggccacattgcagccttaaggaagctgaaagaacagtgtggctgccggatctacaacctgggcacgggcacaggctattcagtgctgcagatggtccaggctatggagaaggcctctgggaagaagatcccgtacaaggtggtggcacggcgggaaggtgatgtggcagcctgttacgccaaccccagcctggcccaagaggagctggggtggacagcagccttagggctggacaggatgtgtgaggatctctggcgctggcagaagcagaatccttcaggctttggcacgcaagcctgaggaccctcccctaccaaggaccaggaaaagcagcagctgcctgctctccagcctctggaggaactcagggccctggagctgctggggccaagccaagggcctcccctacctcaaaccccagctgggcccgcttagcccaccaggcatgaggccaaggctccactgaccaggaggccgaggtctctaactcttatcttccacagggtccaagagttcatcaggacccccaagagtgagtgagggggcaaggctctggcacaaaacctcctcctcccaggcactcatttatattgctctgaaagagctttccaaagtatttaaaaataaaaacaagttttcttacactgg

SEQ ID NO: 881 - DNA, 852 bp; single-stranded, linear
  immediate source library: GENBANK
  immediate source clone: g1122218
ggacggtcctttgttgccgcgaggggtaggagtgggcgtggcggagccagctccgttcggaacactcccgggccgacccgactcgctcatcctgcaggagctgcggcgccaagatgagtggagaggagaacccagccagcaagcccacgccggtgcaggacgtacagggcgacgggcgctggatgtccctgcaccatcggttcgtggctgacagcaaagataaggaacccgaagtcgtcttcatcggggactccttggtccagctcatgcaccagtgcgagatctggcgcgagctcttctctcctctgcatgcacttaactttggcattggtggtgacggcacacagcatgtactgtggcggctggagaatggggagctggaacacatccggcccaagattgtggtggtctgggtgggcaccaacaaccacggacacacagcagagcaggtgactggtggcatcaaggccattgtgcaactggtgaatgagcgacagccccaggcccgggttgtggtgctgggcctgcttccgcgaggccaacatcccaacccacttcgggagaagaaccgacaggtgaacgagctggtacgggcggcactggctggccaccctcgggcccacttcctagatgccgaccctggctttgtgcactcagatggcaccatcagccatcatgacatgtatgattacctgcatctgagccgcctgggctacacacctgtttgccgggctctgcactccctgcttctgcgtctgctggcccaagaccagggccaaggtgctcccctgctggagcccgcaccctaagcatcctgctgccttcccacaacattaaactctccttcctcag

SEQ ID NO: 882 - DNA, 1610 bp; single-stranded, linear
  immediate source library: GENBANK
  immediate source clone: g1125055
cccagagcagcgctcgccacctccccccggcctgggcagcgctcgcccggggagtccagcggtgtcctgtggagctgccgccatggccccgcggcgggcgcgcggctgccggaccctcggtctcccggcgctgctactgctgctgctgctccggccgccggcgacgcggggcatcacgtgccctccccccatgtccgtggaacacgcagacatctgggtcaagagctacagcttgtactccagggagcggtacatttgtaactctggtttcaagcgtaaagccggcacgtccagcctgacggagtgcgtgttgaacaaggccacgaatgtcgcccactggacaacccccagtctcaaatgcattagagaccctgccctggttcaccaaaggccagcgccaccctccacagtaacgacggcaggggtgaccccacagccagagagcctctccccttctggaaaagagcccgcagcttcatctcccagctcaaacaacacagcggccacaacagcagctattgtcccgggctcccagctgatgccttcaaaatcaccttccacaggaaccacagagataagcagtcatgagtcctcccacggcaccccctctcagacaacagccaagaactgggaactcacagcatccgcctcccaccagccgccaggtgtgtatccacagggccacagcgacaccactgtggctatctccacgtccactgtcctgctgtgtgggctgagcgctgtgtctctcctggcatgctacctcaagtcaaggcaaactcccccgctggccagcgttgaaatggaagccatggaggctctgccggtgacttgggggaccagcagcagagatgaagacttggaaaactgctctcaccacctatgaaactcggggaaaccagcccagctaagtccggagtgaaggagcctctctgctttagctaaagacgactgagaagaggtgcaaggaagcgggctccaggagcaagctcaccaggcctctcagaagtcccagcaggatctcacggactgccgggtcggcgcctcctgcgcgagggagcaggttctccgcattcccatgggcaccacctgcctgcctgtcgtgccttggacccagggcccagcttcccaggagagaccaaaggcttctgagcaggatttttatttcattacagtgtgagctgcctggaatacatgtggtaatgaaataaaaaccctgccccgaatcttccgtccctcatcctaacttgcagttcacagagaaaagtgacatacccaaagctctctgtcaattacaaggcttctcctggcgtgggagacgtctacagggaagacaccagcgtttgggcttctaaccaccctgtctccagctgctctgcacacatggacagggacctgggaaaggtgggagagatgctgagcccagcgaatcctctccattgaaggattcaggaagaagaaaactcaactcagtgccattttacgaatatatgcgtttatatttatacttccttgtctattatatctatacattatatattatttgtattttgacattgtaccttgtataaacaaaataaaacatctattttcaatatttttaaaatgca

SEQ ID NO: 883 - DNA, 1308 bp; single-stranded, linear
  immediate source library: GENBANK
  immediate source clone: g1127832
cgggaaggattgaatacgagacgctgtctgcttgctgccttaagacagctagctgaattgctgattaacttttaaaatacccagcttggtttatttttcttagaatctgttgctaagactggggacgctgttttcttttacaaagggaaatctaagttaatttcaaggcattcgaaatggggaaagactattattgcattttgggaattgagaaaggagcttcagatgaagatattaaaaaggcttaccgaaaacaagccctcaaatttcatccggacaagaacaaatctcctcaggcagaggaaaaatttaaagaggtcgcagaagcttatgaagtattgagtgatcctaaaaagagagaaatatatgatcagtttggggaggaagggttgaaaggaggagcaggaggtactgatggacaaggaggtaccttccggtacacctttcatggcgatcctcatgctacatttgctgcatttttcnnagggtccaacccctttnaaattttctttggaagacgaatgggtggtggtagagattctgaagaaatggaaatagatggtgatccttttagtgcctttggtttcagcatgaatggatatccaagagacaggaattctgtggggccatcccgcctcaaacaagatcctccagttatcatgaacttagagtatcacttgaagagatatatagtggttgtaccaaacggatgaagatttctcgaaaaaggctaaacgtactgatggaaggagttacagatctgaggacaaaattcttaccattgagattaaaaaagggtggaaagaaggcaccaaaattacttttccaagagaaggagatgaaaacaccaaatagtattccagcagacattgtttttatcattaaagacaaagatcatccaaaatttaaaagggatggatcaaatataatttactgctaaaattagtttacgagaggagattgtgtggcgtgctcaattaatgtaccaacactggatggaagaacatacctatgtcagtaaatgatattgtgaacccggaatgaggagaagaattattggatatgggctgccatttccaaaaaatcctgaccaacgtggtgaccttctaatagaatttgaggtgtccttcccagatactatatcttcttcatggaaagaagtactagacatctccgcctcatagaatgagacttgtagagatattttgataaggcactgaaaatataaaaggagtggtagtttactgatgtagatgtgaattctgtataaagatgtgtaaattgttttgagggttcattaaattgcat

SEQ ID NO: 884 - DNA, 993 bp; single-stranded, linear
  immediate source library: GENBANK
  immediate source clone: g1136797
gaattcggcacgaggcgccttcttgcccggcggctgctggaaaatgtctcaggagaggcccacgttctaccggcaggagctgaacaagacaatctgggaggtgcccgagcgttaccagaacctgtctccagtgggctctggcgcctatggctctgtgtgtgctgcttttgacacaaaaacggggttacgtgtggcagtgaagaagctctccagaccatttcagtccatcattcatgcgaaaagaacctacagagaactgcggttacttaaacatatgaaacatgaaaatgtgattggtctgttggacgtttttacacctgcaaggtctctggaggaattcaatgatgtgtatctggtgacccatctcatgggggcagatctgaacaacattgtgaaatgtcagaagcttacagatgaccatgttcagttccttatctaccaaattctccgaggtctaaagtatatacattcagctgacataattcacagggacctaaaacctagtaatctagctgtgaatgaagactgtgagctgaagattctggattttggactggctcggcacacagatgatgaaatgacaggctacgtggccactaggtggtacagggctcctgagatcatgctgaactggatgcattacaaccagacagttgatatttggtcagtgggatgcataatggccgagctgttgactggaagaacattgtttcctggtacagaccatattgatcagttgaagctcattttaagactcgttggaaccccaggggctgagcttttgaagaaaatctcctcagagtctgcaagaaactatattcagtctttgactcagatgccgaagatgaactttgcgaatgtatttattggtgccaatcccctgggtaagttgaccatatatcctcacctcatggatattgaattggttatgatataaattggggatttgaagaagagtttctccttttgaccaaataaagtaccattagttga

SEQ ID NO: 885 - DNA, 3800 bp; single-stranded, linear
  immediate source library: GENBANK
  immediate source clone: g1139594
ggcacgagccggtctggcttgggcaggctgcccgggccgtggcaggaagccggaagcagccgcggccccagttcgggagacatggcgggcgttaaagctctcgtggcattatccttcagtggggctattggactgacttttcttatgctgggatgtgccttagaggattatgggtgtacttctctgaagtaagatgatttgtcaaaaattctgtgtggttttgttacattgggaatttatttatgtgataactgcgtttaacttgtcatatccaattactccttggagatttaagttgtcttgcatgccaccaaattcaacctatgactacttccttttgcctgctggactctcaaagaatacttcaaattcgaatggacattatgagacagctgttgaacctaagtttaattcaagtggtactcacttttctaacttatccaaaacaactttccactgttgctttcggagtgagcaagatagaaactgctccttatgtgcagacaacattgaaggaaagacatttgtttcaacagtaaattctttagtttttcaacaaatagatgcaaactggaacatacagtgctggctaaaaggagacttaaaattattcatctgttatgtggagtcattatttaagaatctattcaggaattataactataaggtccatcttttatatgttctgcctgaagtgttagaagattcacctctggttccccaaaaaggcagttttcagatggttcactgcaattgcagtgttcatgaatgttgtgaatgtcttgtgcctgtgccaacagccaaactcaacgacactctccttatgtgtttgaaaatcacatctggtggagtaattttccagtcacctctaatgtcagttcagcccataaatatggtgaagcctgatccaccattaggtttgcatatggaaatcacagatgatggtaatttaaagatttcttggtccagcccaccattggtaccatttccacttcaatatcaagtgaaatattcagagaattctacaacagttatcagagaagctgacaagattgtctcagctacatccctgctagtagacagtatacttcctgggtcttcgtatgaggttcaggtgaggggcaagagactggatggcccaggaatctggagtgactggagtactcctcgtgtctttaccacacaagatgtcatatactttccacctaaaattctgacaagtgttgggtctaatgtttcttttcactgcatctataagaaggaaaacaagattgttccctcaaaagagattgtttggtggatgaatttagctgagaaaattcctcaaagccagtatgatgttgtgagtgatcatgttagcaaagttacttttttcaatctgaatgaaaccaaacctcgaggaaagtttacctatgatgcagtgtactgctgcaatgaacatgaatgccatcatcgctatgctgaattatatgtgattgatgtcaatatcaatatctcatgtgaaactgatgggtacttaactaaaatgacttgcagatggtcaaccagtacaatccagtcacttgcggaaagcactttgcaattgaggtatcataggagcagcctttactgttctgatattccatctattcatcccatatctgagcccaaagattgctatttgcagagtgatggtttttatgaatgcattttccagccaatcttcctattatctggctacacaatgtggattaggatcaatcactctctaggttcacttgactctccaccaacatgtgtccttcctgattctgtggtgaagccactgcctccatccagtgtgaaagcagaaattactataaacattggattattgaaaatatcttgggaaaagccagtctttccagagaataaccttcaattccagattcgctatggtttaagtggaaaagaagtacaatggaagatgtatgaggtttatgatgcaaaatcaaaatctgtcagtctcccagttccagacttgtgtgcagtctatgctgttcaggtgcgctgtaagaggctagatggactgggatattggagtaattggagcaatccagcctacacagttgtcatggatataaaagttcctatgagaggacctgaattttggagaataattaatggagatactatgaaaaaggagaaaaatgtcactttactttggaagcccctgatgaaaaatgactcattgtgcagtgttcagagatatgtgataaaccatcatacttcctgcaatggaacatggtcagaagatgtgggaaatcacacgaaattcactttcctgtggacagagcaagcacatactgttacggttctggccatcaattcaattggtgcttctgttgcaaattttaatttaaccttttcatggcctatgagcaaagtaaatatcgtgcagtcactcagtgcttatcctttaaacagcagttgtgtgattgtttcctggatactatcacccagtgattacaagctaatgtattttattattgagtggaaaaatcttaatgaagatggtgaaataaaatggcttagaatctcttcatctgttaagaagtattatatccatgatcattttatccccattgagaagtaccagttcagtctttacccaatatttatggaaggagtgggaaaaccaaagataattaatagtttcactcaagatgatattgaaaaacaccagagtgatgcaggtttatatgtaattgtgccagtaattatttcctcttccatcttattgcttggaacattattaatatcacaccaaagaatgaaaaagctattttgggaagatgttccgaaccccaagaattgttcctgggcacaaggacttaattttcagaagccagaaacgtttgagcatctttttatcaagcatacagcatcagtgacatgtggtcctcttcttttggagcctgaaacaatttcagaagatatcagtgttgatacatcatggaaaaataaagatgagatgatgccaacaactgtggtctctctactttcaacaacagatcttgaaaagggttctgtttgtattagtgaccagttcaacagtgttaacttctctgaggctgagggtactgaggtaacctatgaggccgaaagccagagacaaccctttgttaaatacgccacgctgatcagcaactctaaaccaagtgaaactggtgaagaacaagggcttataaatagttcagtcaccaagtgcttctctagcaaaaattctccgttgaaggattctttctctaatagctcatgggagatagaggcccaggcattttttatattatcagatcagcatcccaacataatttcaccacacctcacattctcagaaggattggatgaacttttgaaattggagggaaatttccctgaagaaaataatgataaaaagtctatctattatttaggggtcacctcaatcaaaaagagagagagtggtgtgcttttgactgacaagtcaagggtatcgtgcccattcccagccccctgtttattcacggacatcagagttctccaggacagttgctcacactttgtagaaaataatatcaacttaggaacttctagtaagaagacttttgcatcttacatgcctcaattccaaacttgttctactcagactcataagatcatggaaaacaagatgtgtgacctaactgtgtaatttcactgaagaaaccttcagatttgtgttataatgggtaatataaagtgtaatagattatagttgtgggtgggagagagaaaagaaaccagagtccaaatttgaaaat

SEQ ID NO: 886 - DNA, 2554 bp; single-stranded, linear
  immediate source library: GENBANK
  immediate source clone: g1143491
aggtcgacgccggccaagacagcacagacagattgacctattggggtgtttcgcgagtgtgagagggaagcgccgcggcctgtatttctagacctgcccttcgcctggttcgtggcgccttgtgaccccgggcccctgccgcctgcaagtcggaaattgcgctgtgctcctgtgctacggcctgtggctggactgcctgctgctgcccaactggctggcaagatgaagctctccctggtggccgcgatgctgctgctgctcagcgcggcgcgggccgaggaggaggacaagaaggaggacgtgggcacggtggtcggcatcgacttggggaccacctactcctgcgtcggcgtgttcaagaacggccgcgtggagatcatcgccaacgatcagggcaaccgcatcacgccgtcctatgtcgccttcactcctgaaggggaacgtctgattggcgatgccgccaagaaccagctcacctccaaccccgagaacacggtctttgacgccaagcggctcatcggccgcacgtggaatgacccgtctgtgcagcaggacatcaagttcttgccgttcaaggtggttgaaaagaaaactaaaccatacattcaagttgatattggaggtgggcaaacaaagacatttgctcctgaagaaatttctgccatggttctcactaaaatgaaagaaaccgctgaggcttatttgggaaagaaggttacccatgcagttgttactgtaccagcctattttaatgatgcccaacgccaagcaaccaaagacgctggaactattgctggcctaaatgttatgaggatcatcaacgagcctacggcagctgctattgcttatggcctggataagagggagggggagaagaacatcctggtgtttgacctgggtggcggaaccttcgatgtgtctcttctcaccattgacaatggtgtcttcgaagttgtggccactaatggagatactcatctgggtggagaagactttgaccagcgtgtcatggaacacttcatcaaactgtacaaaaagaagacgggcaaagatgtcaggaaggacaatagagctgtgcagaaactccggcgcgaggtagaaaaggccaaggccctgtcttctcagcatcaagcaagaattgaaattgagtccttctatgaaggagaagacttttctgagaccctgactcgggccaaatttgaagagctcaacatggatctgttccggtctactatgaagcccgtccagaaagtgttggaagattctgatttgaagaagtctgatattgatgaaattgttcttgttggtggctcgactcgaattccaaagattcagcaactggttaaagagttcttcaatggcaaggaaccatcccgtggcataaacccagatgaagctgtagcgtatggtgctgctgtccaggctggtgtgctctctggtgatcaagatacaggtgacctggtactgcttcatgtatgtccccttacacttggtattgaaactgtaggaggtgtcatgaccaaactgattccaagtaatacagtggtgcctaccaagaactctcagatcttttctacagcttctgataatcaaccaactgttacaatcaaggtctatgaaggtgaaagacccctgacaaaagacaatcatcttctgggtacatttgatctgactggaattcctcctgctcctcgtggggtcccacagattgaagtcacctttgagatagatgtgaatggtattcttcgagtgacagctgaagacaagggtacagggaacaaaaataagatcacaatcaccaatgaccagaatcgcctgacacctgaagaaatcgaaaggatggttaatgatgctgagaagtttgctgaggaagacaaaaagctcaaggagcgcattgatactagaaatgagttggaaagctatgcctattctctaaagaatcagattggagataaagaaaagctgggaggtaaactttcctctgaagataaggagaccatggaaaaagctgtagaagaaaagattgaatggctggaaagccaccaagatgctgacattgaagacttcaaagctaagaagaaggaactggaagaaattgttcaaccaattatcagcaaactctatggaagtgcaggccctcccccaactggtgaagaggatacagcagaaaaagatgagttgtagacactgatctgctagtgctgtaatattgtaaatactggactcaggaacttttgttaggaaaaaattgaaagaacttaagtctcgaatgtaattggaatcttcacctcagagtggagttgaactgctatagcctaagcggctgtttactgcttttcattagcagttgctcacatgtctttgggtggggggggagaagaagaattggccatcttaaaaagcgggtaaaaaacctgggttagggtgtgtgttcaccttcaaaatgttctatttaacaactgggtcatgtgcatctggtgtaggaagttttttctaccataagtgacaccaataaatgtttgttatttacactggtcaaaaaaaaaaaaaaaaa

SEQ ID NO: 887 - DNA, 3798 bp; single-stranded, linear
  immediate source library: GENBANK
  immediate source clone: g1147602
ctgctggnccgggtgctaggnccctgactgcccggggccgggggtgcggggcccgctgagcccgcgcccacctggaactcgcgctggctggcgagcgctgcgcgcagncccagttcccacacccgcctctccctccacacttccccgcaagcagagggagccggctctggcttcggccagcccagagaggggcccccacagcgcagtggcgggctgaagggctcctccagcacggncagaatggacgccaaggncgaggaggcgccgagagcgagcgagggctgctagcacgttgtcacctcgcattctgaaccacagactctccaactctccggngcttttcgcccactcggtccctcagaacacgaagggctctctcatcctgtcactaaaacgattagctgtccggagacacggaaaaagtcgcccctcttctttgcaggattcctcccttgaacttctccaaaccctcttagtgtgacgtgaccccacccctagctaacccaggctgcttccttaccagcttcccgccccctggggaggcggcaatgcaaagaccgtccgctgccagctctgccgctatctctgtggggtgaatctaacatggcggacaaagacagtaactagtcccgtttctccgcgttttcgccaagaagattggctcttaccacttgtccctcaaaacgaccaccccattgactggtggcgattgcgtcgacggagacggggcaaaagcaagctgaacccgaaaaataacaaacactggggctgaggggtggaactacgagtgcgcagacatgggccagagcgcatttcccctgccccaggcaaattcggcgctcactgcgtccccgcaggccactgaccttacaagactacttgccccagactcctggggctggatgggaattgtagtctccctaaagagttgtacgtatctttttaaggcctagtttctgctttcnaaatacgaaaacataacactccagtccataactgttgacaagtacaagcgcgcacaggtctccaatctatccactggatttccgtgagaattgtgcccgctctggtattggatgttcctctccataagactacagtttctaaggaacactgtggcgaagacctttcattccgcaacgcatgctggaaataattatttccctccacccccccaacaatccttattacttatatttaccgaaactggagacctccattagggcggaaagagtgggggattgggacctcttcttacgactgctttggacaataggtagcgattctgaccttcgtacagcaattactgtgatgcaataagccgcaactggaagagtagaggctagagggcaggcactttatggcaaactcaggtagaattcttcctcttccgtctctttccttttacgtcatccgggggcagactgggtggccaatccagagccccgagagacgcttggctctttctgtccctcccatcctctgattgtaccttgatttcgtattctgagaggctgctgcttagcggtagccccttggtttccgtggcaacggaaaagcgcgggaattacagataaattaaaactgcgactgcgcggcgtgagctcgctgagacttcctggacgggggacaggctgtggggtttctcagataactgggcccctgcgctcaggaggccttcaccctctgctctgggtaaaggtagtagagtcccgggaaagggacagggggcccaagtgatgctctggggtactggcgtgggagagtggatttccgaagctgacagatgggtattctttgacggggggtaggggcggaacctgagaggcgtaaggcgttgtgaaccctggggaggggggcagtttgtaggtcgcgagggaagcgctgaggatcaggaagggggcactgagtgtccgtgggggaatcctcgtgataggaactggaatatgccttgagggggacactatgtctttaaaaacgtcggctggtcatgaggtcaggagttccagaccagcctgaccaacgtnggtgaaactccgtctctactaaaaatacaaaaattagccgggcgtggtgccgctccagctactcaggaggctgaggcaggagaatcgctagaacccgggaggcggaggttgcagtgagccgagatcgcgccattgcactccagcctgggcgacagagcgagactgtctcaaaacaaaacaaaacaaaacaaaacaaaaaacaccggctggtatgtatgagaggatgggaccttgtggaagaagaggtgccaggaatatgtctgggaaggggaggagacaggattttgtgggagggagaacttaagaactggatccatttgcgccattgagaaagcgcaagagggaagtagaggagcgtcagtagtaacagatgctgccggcagggatgtgcttgaggaggatccagagatgagagcaggtcactgggaaaggttaggggcggggaggccttgattggtgttggtttggtcgttgttgattttggttttatgcaagggaaagaaaacaaccagaaacattggagaaagctaaggctaccaccacctacccggtcagtcactcctctgtagctttctctttcttggagaaaggaaaagacccaaggggttggcagcaatatgtgaaaaaattcagaatttatgttgtctaattacaaaaagcaacttctagaatctttaaaaatataggacgttgtcattagttctttggtttgtattattctaaaaccttccaaatcttaaatttactttattttaaaatgataaaatgaagttgtcattttataaaccttttaaaaagatatatatatatgtttttctaatgtgttaaagttcattggaacagaaagaaatggatttatctgctcttcgcgttgaagaagtacaaaatgtcattaatgctatgcagaaaatcttagagtgtcccatctggtaagtcagcacaagagtgtattaatttgggattcctatgattatctcctatgcaaatgaacagaattgaccttacatactagggaagaaaagacatgtctagtaagattaggctattgtaattgctgattttcttaactgaagaactttaaaaatatagaaaatgattccttgttctccatccactctgcctctcccactcctctccttttcaacacaaatcctgtggtccgggaaagacagggactctgtcttgattggttctgcactggggcaggaatctagtttagattaactggcattttggcttttcttccagctctaaaacaagctccatcacttgaaatggcaaaataaaatcatggatgaggccgagggcggtggcttatgcctgtaatcccagcactttgggaggccaaggtggtaggatcacgaggtcaggagatcgagaccatcctggccaacatggtgaaaccccctctccactaaaaatacaaaaattagctgggcgtagtggcatgtgcctgtaatcccagctactcaggaggctgaggcaggagaatcacttgaaccaggaggcagatgttgctgtgagccaatatggcaccactgaactccagcgacagagctaaactccatctcaaaaaaaaaaaaaaaaaaaaanaaacatggatgatcggtgtcgttgagaggataggtatttggaagaacctttgtttgaaactggctctgtacatacaatgaaattacatacttatttacatacaatgaaatgcagaggttttttttttatataggatctctgtcgagaggctggagtgcagtggtgctatcacagctca

SEQ ID NO: 888 - DNA, 1769 bp; single-stranded, linear
  immediate source library: GENBANK
  immediate source clone: g1149557
cctcactgactataaaagaatagagaaggaagggcttcagtgaccggctgcctggctgacttacagcagtcagactctgacaggatcatggctatgatggaggtccaggggggacccagcctgggacagacctgcgtgctgatcgtgatcttcacagtgctcctgcagtctctctgtgtggctgtaacttacgtgtactttaccaacgagctgaagcagatgcaggacaagtactccaaaagtggcattgcttgtttcttaaaagaagatgacagttattgggaccccaatgacgaagagagtatgaacagcccctgctggcaagtcaagtggcaactccgtcagctcgttagaaagatgattttgagaacctctgaggaaaccatttctacagttcaagaaaagcaacaaaatatttctcccctagtgagagaaagaggtcctcagagagtagcagctcacataactgggaccagaggaagaagcaacacattgtcttctccaaactccaagaatgaaaaggctctgggccgcaaaataaactcctgggaatcatcaaggagtgggcattcattcctgagcaacttgcacttgaggaatggtgaactggtcatccatgaaaaagggttttactacatctattcccaaacatactttcgatttcaggaggaaataaaagaaaacacaaagaacgacaaacaaatggtccaatatatttacaaatacacaagttatcctgaccctatattgttgatgaaaagtgctagaaatagttgttggtctaaagatgcagaatatggactctattccatctatcaagggggaatatttgagcttaaggaaaatgacagaatttttgtttctgtaacaaatgagcacttgatagacatggaccatgaagccagttttttcggggcctttttagttggctaactgacctggaaagaaaaagcaataacctcaaagtgactattcagttttcaggatgatacactatgaagatgtttcaaaaaatctgaccaaaacaaacaaacagaaaacagaaaacaaaaaaacctctatgcaatctgagtagagcagccacaaccaaaaaattctacaacacacactgttctgaaagtgactcacttatcccaagaaaatgaaattgctgaaagatctttcaggactctacctcatatcagtttgctagcagaaatctagaagactgtcagcttccaaacattaatgcaatggttaacatcttctgtctttataatctactccttgtaaagactgtagaagaaagcgcaacaatccatctctcaagtagtgtatcacagtagtagcctccaggtttccttaagggacaacatccttaagtcaaaagagagaagaggcaccactaaaagatcgcagtttgcctggtgcagtggctcacacctgtaatcccaacattttgggaacccaaggtgggtagatcacgagatcaagagatcaagaccatagtgaccaacatagtgaaaccccatctctactgaaagtgcaaaaattagctgggtgtgttggcacatgcctgtagtcccagctacttgagaggctgaggcaggagaatcgtttgaacccgggaggcagaggttgcagtgtggtgagatcatgccactacactccagcctggcgacagagcgagacttggtttcaaaaaaaaaaaaaaaaaaaaacttcagtaagtacgtgttatttttttcaataaaattctattacagtatgtcaaaaaaaaaaaaaaaaaa

SEQ ID NO: 889 - DNA, 4425 bp; single-stranded, linear
  immediate source library: GENBANK
  immediate source clone: g1150990
tcgggtcggacccacgcgcagcggccggagatgcagcggggcgccgcgctgtgcctgcgactgtggctctgcctgggactcctggacggcctggtgagtggctactccatgacccccccgaccttgaacatcacggaggagtcacacgtcatcgacaccggtgacagcctgtccatctcctgcaggggacagcaccccctcgagtgggcttggccaggagctcaggaggcgccagccaccggagacaaggacagcgaggacacgggggtggtgcgagactgcgagggcacagacgccaggccctactgcaaggtgttgctgctgcacgaggtacatgccaacgacacaggcagctacgtctgctactacaagtacatcaaggcacgcatcgagggcaccacggccgccagctcctacgtgttcgtgagagactttgagcagccattcatcaacaagcctgacacgctcttggtcaacaggaaggacgccatgtgggtgccctgtctggtgtccatccccggcctcaatgtcacgctgcgctcgcaaagctcggtgctgtggccagacgggcaggaggtggtgtgggatgaccggcggggcatgctcgtgtccacgccactgctgcacgatgccctgtacctgcagtgcgagaccacctggggagaccaggacttcctttccaaccccttcctggtgcacatcacaggcaacgagctctatgacatccagctgttgcccaggaagtcgctggagctgctggtaggggagaagctggtcctgaactgcaccgtgtgggctgagtttaactcaggtgtcacctttgactgggactacccagggaagcaggcagagcggggtaagtgggtgcccgagcgacgctcccagcagacccacacagaactctccagcatcctgaccatccacaacgtcagccagcacgacctgggctcgtatgtgtgcaaggccaacaacggcatccagcgatttcgggagagcaccgaggtcattgtgcatgaaaatcccttcatcagcgtcgagtggctcaaaggacccatcctggaggccacggcaggagacgagctggtgaagctgcccgtgaagctggcagcgtaccccccgcccgagttccagtggtacaaggatggaaaggcactgtccgggcgccacagtccacatgccctggtgctcaaggaggtgacagaggccagcacaggcacctacaccctcgccctgtggaactccgctgctggcctgaggcgcaacatcagcctggagctggtggtgaatgtgcccccccagatacatgagaaggaggcctcctcccccagcatctactcgcgtcacagccgccaggccctcacctgcacggcctacggggtgcccctgcctctcagcatccagtggcactggcggccctggacaccctgcaagatgtttgcccagcgtagtctccggcggcggcagcagcaagacctcatgccacagtgccgtgactggagggcggtgaccacgcaggatgccgtgaaccccatcgagagcctggacacctggaccgagtttgtggagggaaagaataagactgtgagcaagctggtgatccagaatgccaacgtgtctgccatgtacaagtgtgtggtctccaacaaggtgggccaggatgagcggctcatctacttctatgtgaccaccatccccgacggcttcaccatcgaatccaagccatccgaggagctactagagggccagccggtgctcctgagctgccaagccgacagctacaagtacgagcatctgcgctggtaccgcctcaacctgtccacgctgcacgatgcgcacgggaacccgcttctgctcgactgcaagaacgtgcatctgttcgccacccctctggccgccagcctggaggaggtggcacctggggcgcgccacgccacgctcagcctgagtatcccccgcgtcgcgcccgagcacgagggccactatgtgtgcgaagtgcaagaccggcgcagccatgacaagcactgccacaagaagtacctgtcggtgcaggccctggaagcccctcggctcacgcagaacttgaccgacctcctggtgaacgtgagcgactcgctggagatgcagtgcttggtggccggagcgcacgcgcccagcatcgtgtggtacaaagacgagaggctgctggaggaaaagtctggagtcgacttggcggactccaaccagaagctgagcatccagcgcgtgcgcgaggaggatgcgggacgctatctgtgcagcgtgtgcaacgccaagggctgcgtcaactcctccgccagcgtggccgtggaaggctccgaggataagggcagcatggagatcgtgatccttgtcggtaccggcgtcatcgctgtcttcttctgggtcctcctcctcctcatcttctgtaacatgaggaggccggcccacgcagacatcaagacgggctacctgtccatcatcatggaccccggggaggtgcctctggaggagcaatgcgaatacctgtcctacgatgccagccagtgggaattcccccgagagcggctgcacctggggagagtgctcggctacggcgccttcgggaaggtggtggaagcctccgctttcggcatccacaagggcagcagctgtgacaccgtggccgtgaaaatgctgaaagagggcgccacggccagcgagcaccgcgcgctgatgtcggagctcaagatcctcattcacatcggcaaccacctcaacgtggtcaacctcctcggggcgtgcaccaagccgcagggccccctcatggtgatcgtggagttctgcaagtacggcaacctctccaacttcctgcgcgccaagcgggacgccttcagcccctgcgcggagaagtctcccgagcagcgcggacgcttccgcgccatggtggagctcgccaggctggatcggaggcggccggggagcagcgacagggtcctcttcgcgcggttctcgaagaccgagggcggagcgaggcgggcttctccagaccaagaagctgaggacctgtggctgagcccgctgaccatggaagatcttgtctgctacagcttccaggtggccagagggatggagttcctggcttcccgaaagtgcatccacagagacctggctgctcggaacattctgctgtcggaaagcgacgtggtgaagatctgtgactttggccttgcccgggacatctacaaagaccctgactacgtccgcaagggcagtgcccggctgcccctgaagtggatggcccctgaaagcatcttcgacaaggtgtacaccacgcagagtgacgtgtggtcctttggggtgcttctctgggagatcttctctctgggggcctccccgtaccctggggtgcagatcaatgaggagttctgccagcggctgagagacggcacaaggatgagggccccggagctggccactcccgccatacgccgcatcatgctgaactgctggtccggagaccccaaggcgagacctgcattctcggagctggtggagatcctgggggacctgctccagggcaggggcctgcaagaggaagaggaggtctgcatggccccgcgcagctctcagagctcagaagagggcagcttctcgcaggtgtccaccatggccctacacatcgcccaggctgacgctgaggacagcccgccaagcctgcagcgccacagcctggccgccaggtattacaactgggtgtcctttcccgggtgcctggccagaggggctgagacccgtggttcctccaggatgaagacatttgaggaattccccatgaccccaacgacctacaaaggctctgtggacaaccagacagacagtgggatggtgctggcctcggaggagtttgagcagatagagagcaggcatagacaagaaagcggcttcaggtagctgaagcagagagagagaaggcagcatacgtcagcattttcttctctgcacttataagaaagatcaaagactttaagactttcgctatttcttctgctatctactacaaacttcaaagaggaaccaggaggccaagaggagcatgaaagtggacaaggagtgtgaccactgaagcaccacagggaggggttaggcctccggatgactgcgggcaggcctggataatatccagcctcccacaagaagctggtggagcagagtgttccctgactcctccaaggaaagggagacgccctttcatggtctgctgagtaacaggtgccttcccagacactggcgttactgcttgaccaaagagccctcaagcggcccttatgccagcgtgacagagggctcacctcttgccttctaggtcacttctcacaatgtcccttcagcacctgaccctgtgcccgccagttattccttggtaatatgagtaatacatcaaagagtagt

SEQ ID NO: 890 - DNA, 924 bp; single-stranded, linear
  immediate source library: GENBANK
  immediate source clone: g1155218
atggggggcctgacagcctcggacgtacacccgaccctgggggtccagctcttctcagctggaatagcggcgtgcttggcggacgtgatcaccttcccgctggacacggccaaagtccggctccaggtccaaggtgaatgcccgacgtccagtgttattaggtataaaggtgtcctgggaacaatcaccgctgtggtaaaaacagaagggcggatgaaactctacagcgggctgcctgcggggcttcagcggcaaatcagctccgcctctctcaggatcggcctctacgacacggtccaggagttcctcaccgcagggaaagaaacagcacctagtttaggaagcaagattttagctggtctaacgactggaggagtggcagtattcattgggcaacccacagaggtcgtgaaagtcagacttcaagcacagagccatctccacggaatcaaacctcgctacacggggacttataatgcgtacagaataatagcaacaaccgaaggcttgacgggtctttggaaagggactactcccaatctgatgagaagtgtcatcatcaattgtacagagctagtaacatatgatctaatgaaggaggcctttgtgaaaaacaacatattagcagatgacgtcccctgccacttggtgtcggctcttatcgctggattttgcgcaacagctatgtcctccccggtggatgtagtaaaaaccagatttattaattctccaccaggacagtacaaaagtgtgcccaactgtgcaatgaaagtgttcactaacgaaggaccaacggctttcttcaaggggttggtaccttccttcttgcgacttggatcctggaacgtcattatgtttgtgtgctttgaacaactgaaacgagaactgtcaaagtcaaggcagactatggactgtgccacataa

SEQ ID NO: 891 - DNA, 1874 bp; single-stranded, linear
  immediate source library: GENBANK
  immediate source clone: g1155222
gaattccggcaggcacaaactcatccatccccagttgattggaagaaacaacgatgactcctgggaagacctcattggtgtcactgctactgctgctgagcctggaggccatagtgaaggcaggaatcacaatcccacgaaatccaggatgcccaaattctgaggacaagaacttcccccggactgtgatggtcaacctgaacatccataaccggaataccaataccaatcccaaaaggtcctcagattactacaaccgatccacctcaccttggaatctccaccgcaatgaggaccctgagagatatccctctgtgatctgggaggcaaagtgccgccacttgggctgcatcaacgctgatgggaacgtggactaccacatgaactctgtccccatccagcaagagatcctggtcctgcgcagggagcctccacactgccccaactccttccggctggagaagatactggtgtccgtgggctgcacctgtgtcaccccgattgtccaccatgtggcctaagagctctggggagcccacactccccaaagcagttagactatggagagccgacccagcccctcaggaaccctcatccttcaaagacagcctcatttcggactaaactcattagagttcttaaggcagtttgtccaattaaagcttcagaggtaacacttggccaagatatgagatctgaattacctttccctctttccaagaaggaaggtttgactgagtaccaatttgcttcttgtttacttttttaagggctttaagttatttatgtatttaatatgccctgagataactttggggtataagattccattttaatgaattacctactttattttgtttgtctttttaaagaagataagattctgggcttgggaattttattatttaaaaggtaaaacctgtatttatttgagctatttaaggatctatttatgtttaagtatttagaaaaaggtgaaaaagcactattatcagttctgcctaggtaaatgtaagatagaattaaatggcagtgcaaaatttctgagtctttacaacatacggatatagtatttcctcctctttgtttttaaaagttataacatggctgaaaagaaagattaaacctactttcatatgtattaatttaaattttgcaatttgttgaggttttacaagagatacagcaagtctaactctctgttccattaaacccttataataaaatccttctgtaataataaagtttcaaaagaaaatgtttatttgttctcattaaatgtattttagcaaactcagctcttccctattgggaagagttatgcaaattctcctataagcaaaacaaagcatgtctttgagtaacaatgacctggaaatacccaaaattccaagttctcgatttcacatgccttcaagactgaacaccgactaaggttttcatactattagccaatgctgtagacagaagcattttgataggaatagagcaaataagataatggccctgaggaatggcatgtcattattaaagatcatatggggaaaatgaaaccctccccaaaatacaagaagttctgggaggagacattgtcttcagactacaatgtccagtttctcccctagactcaggcttcctttggagattaaggcccctcagagatcaacagaccaacatttttctcttcctcaagcaacactcctagggcctggcttctgtctgatcaaggcaccacacaacccagaaaggagctgatggggcagaatgaactttaagtatgagaaaagttcagcccaagtaaaataaaaactcaatcacattcaattccagagtagtttcaagtttcacatcgtaaccattttcgcccggaattc

SEQ ID NO: 892 - DNA, 1385 bp; single-stranded, linear
  immediate source library: GENBANK
  immediate source clone: g1160928
cgcagcagcagggccgggtcctgcgcctcgggggtcggcgtccaggctcggagcgcggcacggagacggcggcagcgctggactaggtggcaggccctgcatcatggaaactctttctaatgcaagtggtacttttgccatacgccttttaaagatactgtgtcaagataacccttcgcacaacgtgttctgttctcctgtgagcatctcctctgccctggccatggttctcctaggggcaaagggaaacaccgcaacccagatggcccaggcactgtctttaaacacagaggaagacattcatcgggctttccagtcgcttctcactgaagtgaacaaggctggcacacagtacctgctgagaacggccaacaggctctttggagagaaaacttgtcagttcctctcaacgtttaaggaatcctgtcttcaattctaccatgctgagctgaaggagctttcctttatcagagctgcagaagagtccaggaaacacatcaacacctgggtctcaaaaaagaccgaaggtaaaattgaagagttgttgccgggtagctcaattgatgcagaaaccaggctggttcttgtcaatgccatctacttcaaaggaaagtggaatgaaccgtttgacgaaacatacacaagggaaatgccctttaaaataaaccaggaggagcaaaggccagtgcagatgatgtatcaggaggccacgtttaagctcgcccacgtgggcgaggtgcgcgcgcagctgctggagctgccctacgccaggaaggagctgagcctgctggtgctgctgcctgacgacggcgtggagctcagcacggtggaaaaaagtctcacttttgagaaactcacagcctggaccaagccagactgtatgaagagtactgaggttgaagttctccttccaaaatttaaactacaagaggattatgacatggaatctgtgcttcggcatttgggaattgttgatgccttccaacagggcaaggctgacttgtcggcaatgtcagcggagagagacctgtgtctgtccaagttcgtgcacaagagttttgtggaggtgaatgaagaaggcaccgaggcagcggcagcgtcgagctgctttgtagttgcagagtgctgcatggaatctggccccaggttctgtgctgaccaccctttccttttcttcatcaggcacaacagagccaacagcattctgttctgtggcaggttctcatcgccataaagggtgcacttaccgtgcactcggccatttccctcttcctgtgtccccagatccccactacagctccaagaggatgggcctagaaagccaagtgcaaagatgagggcagattctttacctgtctgccctcatgatttgccagcatgaattc

SEQ ID NO: 893 - DNA, 2287 bp; single-stranded, linear
  immediate source library: GENBANK
  immediate source clone: g1160966
gtgacacagcgaagatggcgtcgcccggctgcctgtggctcttggctgtggctctcctgccatggacctgcgcttctcgggcgctgcagcatctggacccgccggcgccgctgccgttggtgatctggcatgggatgggagacagctgttgcaatcccttaagcatgggtgctattaaaaaaatggtggagaagaaaatacctggaatttacgtcttatctttagagattgggaagaccctgatggaggacgtggagaacagcttcttcttgaatgtcaattcccaagtaacaacagtgtgtcaggcacttgctaaggatcctaaattgcagcaaggctacaatgctatgggattctcccagggaggccaatttctgagggcagtggctcagagatgcccttcacctcccatgatcaatctgatctcggttgggggacaacatcaaggtgtttttggactccctcgatgcccaggagagagctctcacatctgtgacttcatccgaaaaacactgaatgctggggcgtactccaaagttgttcaggaacgcctcgtgcaagccgaatactggcatgaccccataaaggaggatgtgtatcgcaaccacagcatcttcttggcagatataaatcaggagcggggtatcaatgagtcctacaagaaaaacctgatggccctgaagaagtttgtgatggtgaaattcctcaatgattccattgtggaccctgtagattcggagtggtttggattttacagaagtggccaagccaaggaaaccattcccttacaggagacctccctgtacacacaggaccgcctggggctaaaggaaatggacaatgcaggacagctagtgtttctggctacagaaggggaccatcttcagttgtctgaagaatggttttatgcccacatcataccattccttggatgaaacccgtatagttcacaatagagctcagggagcccctaactcttccaaaccacatgggagacagtttccttcatgcccaagcctgagctcagatccagcttgcaactaatccttctatcatctaacatgccctacttggaaagatctaagatctgaatcttatcctttgccatcttctgttaccatatggtgttgaatgcaagtttaattaccatggagattgttttacaaacttttgatgtggtcaagttcagttttagaaaagggagtctgttccagatcagggccagaactgtgcccaggcccaaaggagacaactaactaaagtagtgagatagattctaagggcaaacatttttccaagtcttgccatatttcaagcaaagaggtgcccaggcctgaggtactcacataaatgctttgttttgctggtgatttaaccagtgcttggaaaaatcttgcttggctatttctgcatcatttcttaaggctgccttcctctctgagtacgttgccctctgtgctatcaatcatcttatcatcaattattagacaaatcccactggcctacagtcttgcttctgcagcacccactttgtctcctcaggtagtgatgaattagttgctgtcacaaaaggagggaagtagcacccaaattaaattgcttaagagaggaaatgtacatcttgtataacttagggagcgaagaaaatgtaggcgcgaaagtgaaaagtgaggcagctagttcttcctattccattctcgaccaacctgccctttcttaatatgactagtggtcttgatgctagagtcaacttactctgttgctggctttagcagagaataggaggaaccatatgaaaaagatcaggctttctgacttccatccccaaaacacatttaccagcatactccaaactgtttctgatgtgttccatgagaaaaggattgtttgctcaaaaagcttggaaaatactacacactccctttctccttctggagatcaacccacattagagtgtctaaggactcctgagaattcctgttacagtaaacaaaactaacgtaatctaccatttcctacactatttgagcatggaaatcatagtccccactctgtgaaaacttaacgctttttggaagacatttctgtagcatgtcagtttggagaaatgatgagctacgccttgatgaaagaaccgtgttggtgctgctaagtttagccattatggtttttcctttctctctcttaagccttattcttcaactaaaagatgaggattaagagcaagaagttgggggggatgtgaaaataattttatgaggttgtctaaaataaagagtagtttctt

SEQ ID NO: 894 - DNA, 2563 bp; single-stranded, linear
  immediate source library: GENBANK
  immediate source clone: g1160974
gggcagcaggtttacaaaggaggaaaacgacttcttctagatttttttttcagtttcttctataaatcaaaactacctccctagagaaaggctagtcccttttcttccccattcatttcattatgaacatagtagaaaacagcatattcttatcaaatttgatgaaaagcgccaacacgtttgaactgaaatacgacttgtcatgtgaactgtaccgaatgtctacgtattccacttttcctgctggggtccctgtctcagaaaggagtcttgctcgcgctggtttctattacactggtgtgaatgacaaggtcaaatgcttctgttgtggcctgatgctggataactggaaaagaggagacagtcctactgaaaagcataaaaagttgtatcctagctgcagattcgttcagagtctaaattccgttaacaacttggaagctacctctcagcctacttttccttcttcagtaacaaattccacacactcattacttccgggtacagaaaacagtggatatttccgtggctcttattcaaactctccatcaaatcctgtaaactccagagcaaatcaagatttttctgccttgatgagaagttcctaccactgtgcaatgaataacgaaaatgccagattacttacttttcagacatggccattgacttttctgtcgccaacagatctggcaaaagcaggcttttactacataggacctggagacagagtggcttgctttgcctgtggtggaaaattgagcaattgggaaccgaaggataatgctatgtcagaacacctgagacattttcccaaatgcccatttatagaaaatcagcttcaagacacttcaagatacacagtttctaatctgagcatgcagacacatgcagcccgctttaaaacattctttaactggccctctagtgttctagttaatcctgagcagcttgcaagtgcgggtttttattatgtgggtaacagtgatgatgtcaaatgcttttgctgtgatggtggactcaggtgttgggaatctggagatgatccatgggttcaacatgccaagtggtttccaaggtgtgagtacttgataagaattaaaggacaggagttcatccgtcaagttcaagccagttaccctcatctacttgaacagctgctatccacatcagacagcccaggagatgaaaatgcagagtcatcaattatccattttgaacctggagaagaccattcagaagatgcaatcatgatgaatactcctgtgattaatgctgccgtggaaatgggctttagtagaagcctggtaaaacagacagttcagagaaaaatcctagcaactggagagaattatagactagtcaatgatcttgtgttagacttactcaatgcagaagatgaaataagggaagaggagagagaaagagcaactgaggaaaaagaatcaaatgatttattattaatccggaagaatagaatggcactttttcaacatttgacttgtgtaattccaatcctggatagtctactaactgccggaattattaatgaacaagaacatgatgttattaaacagaagacacagacgtctttacaagcaagagaactgattgatacgattttagtaaaaggaaatattgcagccactgtattcagaaactctctgcaagaagctgaagctgtgttatatgagcatttatttgtgcaacaggacataaaatatattcccacagaagatgtttcagatctaccagtggaagaacaattgcggagactacaagaagaaagaacatgtaaagtgtgtatggacaaagaagtgtccatagtgtttattccttgtggtcatctagtagtatgcaaagattgtgctccttctttaagaaagtgtcctatttgtaggagtacaatcaagggtacagttcgtacatttctttcatgaagaagaaccaaaacatcatctaaactttagaattaatttattaaatgtattataactttaactttcatcctaatttggtttccttaaaatttttatttatttacaactcaacaaacattgttttgtgtaacatatttaatatatgtatctaaaccatatgaacatatattttttagaaactaagagaatgataggcttttgttcttatgaacgaaaaagaggtagcactacaaacacaatattcaatcaaaatttcagcattattgaaattgtaagtgaagtaaaacttaagatatttgagttaacctttaagaattttaaatattttggcattgtactaataccgggaacatgaagccaggtgtggtggtatgtgcctgtagtcccaggctgaggcaagagaattacttgagcccaggagtttgaatccatcctgggcagcatactgagaccctgcctttaaaaacaaacagaacaaaaacaaaacaccagggacacatttctctgtcttttttgatcagtgtcctatacatcgaaggtgtgcatatatgttgaatgacattttagggacatggtgtttttataaagaattctgtgagaaaaaatttaataaaaccccccaaatt

SEQ ID NO: 895 - DNA, 706 bp; single-stranded, linear
  immediate source library: GENBANK
  immediate source clone: g1161921
atgctgctggaggaggttcgcgccggcgaccggctgagtggggcggcggcccggggcgacgtgcaggaggtgcgccgccttctgcaccgcgagctggtgcatcccgacgccctcaaccgcttcggcaagacggcgctgcaggtcatgatgtttggcagcaccgccatcgccctggagctgctgaagcaaggtgccagccccaatgtccaggacacctccggtaccagtccagtccatgacgcagcccgcactggattcctggacaccctgaaggtcctagtggagcacggggctgatgtcaacgtgcctgatggcaccggggcacttccaatccatctggcagttcaagagggtcacactgctgtggtcagctttctggcagctgaatctgatctccatcgcagggacgccaggggtctcacacccttggagctggcactgcagagaggggctcaggacctcgtggacatcctgccaggccacatggtggccccgctgtgatctggggtcaccctctccagcaagagaacccccccgtggttatgtatcagaagagaggggaagaaacactttctcttcttgtttctcctgcccactgctgcagtaggggaggagcacagtttgtggcttataggtgttggttttgggggtgtgagtgtttgggggacgttctcatttgtttttctcactccttttggtgtgttgg

SEQ ID NO: 896 - DNA, 2680 bp; single-stranded, linear
  immediate source library: GENBANK
  immediate source clone: g1163233
ggttatcctgaatacatgtctaacaattttccttgcaacgttagctgttgtttttcactgtttccaaaggatcaaaattgcttcagaaattggagacatatttgatttaaaaggaaaaacttgaacaaatggacaatatgtctattacgaatacaccaacaagtaatgatgcctgtctgagcattgtgcatagtttgatgtgccatagacaaggtggagagagtgaaacatttgcaaaaagagcaattgaaagtttggtaaagaagctgaaggagaaaaaagatgaattggattctttaataacagctataactacaaatggagctcatcctagtaaatgtgttaccatacagagaacattggatgggaggcttcaggtggctggtcggaaaggatttcctcatgtgatctatgcccgtctctggaggtggcctgatcttcacaaaaatgaactaaaacatgttaaatattgtcagtatgcgtttgacttaaaatgtgatagtgtctgtgtgaatccatatcactacgaacgagttgtatcacctggaattgatctctcaggattaacactgcagagtaatgctccatcaagtatgatggtgaaggatgaatatgtgcatgactttgagggacagccatcgttgtccactgaaggacattcaattcaaaccatccagcatccaccaagtaatcgtgcatcgacagagacatacagcaccccagctctgttagccccatctgagtctaatgctaccagcactgccaactttcccaacattcctgtggcttccacaagtcagcctgccagtatactggggggcagccatagtgaaggactgttgcagatagcatcagggcctcagccaggacagcagcagaatggatttactggtcagccagctacttaccatcataacagcactaccacctggactggaagtaggactgcaccatacacacctaatttgcctcaccaccaaaacggccatcttcagcaccacccgcctatgccgccccatcccggacattactggcctgttcacaatgagcttgcattccagcctcccatttccaatcatcctgctcctgagtattggtgttccattgcttactttgaaatggatgttcaggtaggagagacatttaaggttccttcaagctgccctattgttactgttgatggatacgtggacccttctggaggagatcgcttttgtttgggtcaactctccaatgtccacaggacagaagccattgagagagcaaggttgcacataggcaaaggtgtgcagttggaatgtaaaggtgaaggtgatgtttgggtcaggtgccttagtgaccacgcggtctttgtacagagttactacttagacagagaagctgggcgtgcacctggagatgctgttcataagatctacccaagtgcatatataaaggtctttgatttgcgtcagtgtcatcgacagatgcagcagcaggcggctactgcacaagctgcagcagctgcccaggcagcagccgtggcaggaaacatccctggcccaggatcagtaggtggaatagctccagctatcagtctgtcagctgctgctggaattggtgttgatgaccttcgtcgcttatgcatactcaggatgagttttgtgaaaggctggggaccggattacccaagacagagcatcaaagaaacaccttgctggattgaaattcacttacaccgggccctccagctcctagacgaagtacttcataccatgccgattgcagacccacaacctttagactgaggtcttttaccgttggggcccttaaccttatcaggatggtggactacaaaatacaatcctgtttataatctgaagatatatttcacttttcttctgctttatcttttcataaagggttgaaaatgtgtttgctgccttgctcctagcagacagaaactggattaaaacaatttttttttcctcttcagaacttgtcaggcatggctcagagcttgaagattaggagaaacacattcttattaattcttcacctgttatgtatgaaggaatcattccagtgctagaaaatttagccctttaaaacgtcttagagccttttatctgcagaacatcgatatgtatatcattctacagaataatccagtattgctgattttaaaggcagagaagttctcaaagttaattcacctatgttattttgtgtacaagttgttattgttgaacatacttcaaaaataatgtgccatgtgggtgagttaattttaccaagagtaactttactctgtgtttaaaaatgaagttaataatgtattgtaatctttcatccaaaatattttttgcaagttatattagtgaagatggtttcaattcagattgtcttgcaacttcagttttatttttgccaaggcaaaaaactcttaatctgtgtgtatattgagaatcccttaaaattaccagacaaaaaaatttaaaattacgtttgttattcctagtggatgactgttgatgaagtatacttttcccctgttaaacagtagttgtattcttctgtatttctaggcacaaggttggttgctaagaagcctataagaggaatttcttttccttcattcatagggaaaggttttgtattttttaaaacactaaaagcagcgtcactctacctaatgtct

SEQ ID NO: 897 - DNA, 2643 bp; single-stranded, linear
  immediate source library: GENBANK
  immediate source clone: g1166437
gcctccagctgacctctggctcctgtcctctggctccacctgcaccgccctgctcttcctaaggggccaggaagcccccagaagctctaccatcgacgtgggtggtggcacccggctcaccctgagagcagagggcgtgcagggggctcagttctgagcccagccggcccaccatggcacggcggttccaggaggagctggccgccttcctcttcgagtatgacaccccccgcatggtgctggtgcgtaataagaaggtgggcgttatcttccgactgatccagctggtggtcctggtctacgtcatcgggtgggtgtttctctatgagaagggctaccagacctcgagcggcctcatcagcagtgtctctgtgaaactcaagggcctggccgtgacccagctccctggcctcggcccccaggtctgggatgtggctgactacgtcttcccagcccagggggacaactccttcgtggtcatgaccaatttcatcgtgaccccgaagcagactcaaggctactgcgcagagcacccagaagggggcatatgcaaggaagacagtggctgtacccctgggaaggccaagaggaaggcccaaggcatccgcacgggcaagtgtgtggccttcaacgacactgtgaagacgtgtgagatctttggctggtgccccgtggaggtggatgacgacatcccgcgccctgcccttctccgagaggccgagaacttcactcttttcatcaagaacagcatcagctttccacgcttcaaggtcaacaggcgcaacctggtggaggaggtgaatgctgcccacatgaagacctgcctctttcacaagaccctgcaccccctgtgcccagtcttccagcttggctacgtggtgcaagagtcaggccagaacttcagcaccctggctgagaagggtggagtggttggcatcaccatcgactggcactgtgacctggactggcacgtacggcactgcagacccatctatgagttccatgggctgtacgaagagaaaaatctctccccaggcttcaacttcaggtttgccaggcactttgtggagaacgggaccaactaccgtcacctcttcaaggtgtttgggattcgctttgacatcctggtggacggcaaggccgggaagtttgacatcatccctacaatgaccaccatcggctctggaattggcatctttggggtggccacagttctctgtgacctgctgctgcttcacatcctgcctaagaggcactactacaagcagaagaagttcaaatacgctgaggacatggggccaggggcggctgagcgtgacctcgcagctaccagctccaccctgggcctgcaggagaacatgaggacatcctgatgctcgggccccaactcctgactgggtgcagcgtgaggcttcagcctggagccctggtgggtcccagccagggcagaggggcctccccaggaagtctcctaccctctcagccaggcagagagcagtttgccagaagctcagggtgcatagtaggagagacctgtgcaaatctgagctccggctccgaccccacacaccctgagggaggcctaccctagcctcagccgctcctggtgggggaatggctgggggttgggcaggaccctcccacacacctgcaccctagcttcgtgcttctctctccggactctcattatccaacccgctgcctccatttctctagatctgtgctctccgatgtggcagtcagtaaccataggtgactaaattaaactaaaataaaatagaatgaaacacaaaattcaattcctcggctgaactagccacatttcaactgctcagtagatacgtgtggttagtggctgccatactggacagctcggggcattttcactgtcaaagaaagttctattagacagccctgcttgagccctgtttcttcctggcttcggtttccctggggaacttatcgacaatgcaagctcctgggcccacccccagacctcctgaaccaaaagctccagggctggccgtatgatctgtgtggatggcaaactccccaggccattctgggacctaagtttaagaagtgccgtcctcgaactttctgactctaagctcctgagcgggagtcagacttagccctgagcctgcacttcctgttcaggtgcagacactgaacagggtctcaaacaccttcagcatgtgtgttgtgtgctcacgtgccacacagtgtctcatgcacacaacccagtgtacacaccacctacgtgcacacagcatccttccacactgtgtatgtgaacagcttgggccctgcaaacacaaccatctacacacatctacacccccaagcacacacacatggtccgtgccatgtcacctccatagggaaaggcttctctccaagtgtgccaggccaggacagccctcccagccatgaatccttactcagctacctcgggttggggtgggagccccagccaaatcctgggctccctgcctgtggctcagccccagctcccaaggcctgcctggctctgtctgaacagaaggtctgggggaagcgaggggtggagtacaataaagggaatgaggacaaacaaaaaaaaaaaaaaaaaaaaaaaaaaaaaaaaaaaaaaaaaaaaaa

SEQ ID NO: 898 - DNA, 1700 bp; single-stranded, linear
  immediate source library: GENBANK
  immediate source clone: g1174071
cggcggcccagactatccgctcccaccgcgcccccggcccacctggtggccccggcctggccgccgcccccgcgctgtgcccgggagctcgtcccggacgcgcgaccgggcggcgggggctcggcggccaccgctgcctcaagggagcgaggcgggagggtgtgtgtgcgcggctgtgagcaggggtgccggcgggctgcagcggaggcactttggaagaatgactctggagtccatcatggcgtgctgcctgagcgaggaggccaaggaagcccggcggatcaacgacgagatcgagcggcagctccgcagggacaagcgggacgcccgccgggagctcaagctgctgctgctcgggacaggagagagtggcaagagtacgtttatcaagcagatgagaatcatccatgggtcaggatactctgatgaagataaaaggggcttcaccaagctggtgtatcagaacatcttcacggccatgcaggccatgatcagagccatggacacactcaagatcccatacaagtatgagcacaataaggctcatgcacaattagttcgagaagttgatgtggagaaggtgtctgcttttgagaatccatatgtagatgcaataaagagtttatggaatgatcctggaatccaggaatgctatgatagacgacgagaatatcaattatctgactctaccaaatactatcttaatgacttggaccgcgtagctgaccctgcctacctgcctacgcaacaagatgtgcttagagttcgagtccccaccacagggatcatcgaatacccctttgacttacaaagtgtcattttcagaatggtcgatgtagggggccaaaggtcagagagaagaaaatggatacactgctttgaaaatgtcacctctatcatgtttctagtagcgcttagtgaatatgatcaagttctggtggagtcagacaatgagaaccgaatggaggaaagcaaggctctctttagaacaattatcacatacccctggttccagaactcctcggttattctgttcttaaacaagaaagatcttctagaggagaaaatcatgtattcccatctagtcgactacttcccagaatatgatggaccccagagagatgcccaggcagcccgagaattcattctgaagatgttcgtggacctgaacccagacagtgacaaaattaactactcccacttcacgtgcgccacagacaccgagaatatccgctttgtctttgctgccgtcaaggacaccatcctccagttgaacctgaaggagtacaatctggtctaattgtgcctgctagacacccgccctgcccttccctggtgggctattgaagatacacaagagggactgtatttctgtggaaaacaatttgcataatactaatttattgccgtcctggactctgtgtgagcgtgtccacagagtttgagtaaatattatgattttatttaaactattccagaggaaaaacagaggatgctgaagtacagtcccagcacatttcctctctatctttttttaggcaaaccttgtgactcagtgtattttaaattctcagtcatgcactcacaaagataagacttgtttctttctgtctctctctctttttcttttctatggagcaaaacaaagctgatttccctttttttcttcccccgctaattcatacctccctcctgatgtt

SEQ ID NO: 899 - DNA, 1260 bp; single-stranded, linear
  immediate source library: GENBANK
  immediate source clone: g1183161
atgaagtttccagggcctttggaaaaccagagattgtctttcctgttggaaaaggcaatcactagggaagcacagatgtggaaagtgaatgtgcggaaaatgccttcaaatcagaatgtttctccatcccagagagatgaagtaattcaatggctggccaaactcaagtaccaattcaacctttacccagaaacatttgctctggctagcagtcttttggataggtttttagctaccgtaaaggctcatccaaaatacttgagttgtattgcaatcagctgttttttcctagctgccaagactgttgaggaagatgagagaattccagtactaaaggtattggcaagagacagtttctgtggatgttcctcatctgaaattttgagaatggagagaattattctggataagttgaattgggatcttcacacagccacaccattggattttcttcatattttccatgccattgcagtgtcaactaggcctcagttacttttcagtttgcccaaattgagcccatctcaacatttggcagtccttaccaagcaactacttcactgtatggcctgcaaccaacttctgcaattcagaggatccatgcttgctctggccatggttagtctggaaatggagaaactcattcctgattggctttctcttacaattgaactgcttcagaaagcacagatggatagctcccagttgatccattgtcgggagcttgtggcacatcacctttctactctgcagtcttccctgcctctgaattccgtttatgtctaccgtcccctcaagcacaccctggtgacctgtgacaaaggagtgttcagattacatccctcctctgtcccaggcccagacttctccaaggacaacagcaagccagaagtgccagtcagaggtacagcagccttttaccatcatctcccagctgccagtgggtgcaagcagacctctactaaacgcaaagtagaggaaatggaagtggatgacttctatgatggaatcaaacggctctataatgaagataatgtctcagaaaatgtgggttctgtgtgtggcactgatttatcaagacaagagggacatgcttccccttgtccacctttgcagcctgtttctgtcatgtagtttcaacaagtgctacctttgagtgtaaactaaggtagactactttgggaatgagaacatccaaaatcaggaaaggctgtagaaggaaatataccttaacaggctgatttggagtgacccagaaaa

SEQ ID NO: 900 - DNA, 2540 bp; single-stranded, linear
  immediate source library: GENBANK
  immediate source clone: g1184319
gaaaaggtggacaagtcctattttcaagagaagatgacttttaacagttttgaaggatctaaaacttgtgtacctgcagacatcaataaggaagaagaatttgtagaagagtttaatagattaaaaacttttgctaattttccaagtggtagtcctgtttcagcatcaacactggcacgagcagggtttctttatactggtgaaggagataccgtgcggtgctttagttgtcatgcagctgtagatagatggcaatatggagactcagcagttggaagacacaggaaagtatccccaaattgcagatttatcaacggcttttatcttgaaaatagtgccacgcagtctacaaattctggtatccagaatggtcagtacaaagttgaaaactatctgggaagcagagatcattttgccttagacaggccatctgagacacatgcagactatcttttgagaactgggcaggttgtagatatatcagacaccatatacccgaggaaccctgccatgtattgtgaagaagctagattaaagtcctttcagaactggccagactatgctcacctaaccccaagagagttagcaagtgctggactctactacacaggtattggtgaccaagtgcagtgcttttgttgtggtggaaaactgaaaaattgggaaccttgtgatcgtgcctggtcagaacacaggcgacactttcctaattgcttctttgttttgggccggaatcttaatattcgaagtgaatctgatgctgtgagttctgataggaatttcccaaattcaacaaatcttccaagaaatccatccatggcagattatgaagcacggatctttacttttgggacatggatatactcagttaacaaggagcagcttgcaagagctggattttatgctttaggtgaaggtgataaagtaaagtgctttcactgtggaggagggctaactgattggaagcccagtgaagacccttgggaacaacatgctaaatggtatccagggtgcaaatatctgttagaacagaagggacaagaatatataaacaatattcatttaactcattcacttgaggagtgtctggtaagaactactgagaaaacaccatcactaactagaagaattgatgataccatcttccaaaatcctatggtacaagaagctatacgaatggggttcagtttcaaggacattaagaaaataatggaggaaaaaattcagatatctgggagcaactataaatcacttgaggttctggttgcagatctagtgaatgctcagaaagacagtatgcaagatgagtcaagtcagacttcattacagaaagagattagtactgaagagcagctaaggcgcctgcaagaggagaagctttgcaaaatctgtatggatagaaatattgctatcgtttttgttccttgtggacatctagtcacttgtaaacaatgtgctgaagcagttgacaagtgtcccatgtgctacacagtcattactttcaagcaaaaaatttttatgtcttaatctaactctatagtaggcatgttatgttgttcttattaccctgattgaatgtgtgatgtgaactgactttaagtaatcaggattgaattccattagcatttgctaccaagtaggaaaaaaaatgtacatggcagtgttttagttggcaatataatctttgaatttcttgatttttcagggtattagctgtattatccattttttttactgttatttaattgaaaccatagactaagaataagaagcatcatactataactgaacacaatgtgtattcatagtatactgatttaatttctaagtgtaagtgaattaatcatctggattttttattcttttcagataggcttaacaaatggagctttctgtatataaatgtggagattagagttaatctccccaatcacataatttgttttgtgtgaaaaaggaataaattgttccatgctggtggaaagatagagattgtttttagaggttggttgttgtgttttaggattctgtccattttcttgtaaagggataaacacggacgtgtgcgaaatatgtttgtaaagtgatttgccattgttgaaagcgtatttaatgatagaatactatcgagccaacatgtactgacatggaaagatgtcagagatatgttaagtgtaaaatgcaagtggcgggacactatgtatagtctgagccagatcaaagtatgtatgttgttaatatgcatagaacgagagatttggaaagatatacaccaaactgttaaatgtggtttctcttcggggagggggggattgggggaggggccccagaggggttttagaggggccttttcactttcgacttttttcattttgttctgttcggattttttataagtatgtagaccccgaagggttttatgggaactaacatcagtaacctaacccccgtgactatcctgtgctcttcctagggagctgtgttgtttcccacccaccacccttccctctgaacaaatgcctgagtgctggggcactttg

SEQ ID NO: 901 - DNA, 294 bp; single-stranded, linear
  immediate source library: GENBANK
  immediate source clone: g1185439
atgaaggtctccgcagcacttctgtggctgctgctcatagcagctgccttcagcccccaggggctcgctgggccagcttctgtcccaaccacctgctgctttaacctggccaataggaagataccccttcagcgactagagagctacaggagaatcaccagtggcaaatgtccccagaaagctgtgatcttcaagaccaaactggccaaggatatctgtgccgaccccaagaagaagtgggtgcaggattccatgaagtatctggaccaaaaatctccaactccaaagccataa

SEQ ID NO: 902 - DNA, 1857 bp; single-stranded, linear
  immediate source library: GENBANK
  immediate source clone: g1185451
gagccatgctcgcggcgatgggctctctggcggctgccctctgggcagtggtccatcctcggactctcctactgggcactgtcgcctttctgctcgctgctgactttctcaaaagacggcgcccaaagaactacccgccggggccctggcgcctgcccttccttggcaacttcttccttgtggacttcgagcagtcgcacctggaggttcagctgtttgtgaagaaatatgggaacctttttagcttggagcttggtgacatatctgcagttcttattactggcttgcccttaatcaaagaagcccttatccacatggaccaaaactttgggaaccggcccgtgacccctatgcgagaacatatctttaagaaaaatggattgattatgtcaagtggccaggcatggaaggagcaaagaaggttcactctgacagcactaaggaactttggtttaggaaagaagagcttagaggaacgcattcaggaggaggcccaacacctcactgaagcaataaaagaggagaacggacagccttttgaccctcatttcaagatcaacaatgcagtttccaatatcatttgctccatcaccttcggagaacgctttgagtaccaggatagttggtttcagcagctgctgaagttactagatgaagtcacatacttggaggcttcaaagacatgccagctctacaatgtctttccatggataatgaaattcctgcctggaccccaccaaactctcttcagcaactggaaaaaactgaaattgtttgtttctcatatgattgacaaacacagaaaggattggaatcctgcagaaacaagagactttattgatgcttaccttaaagaaatgtcaaagcacacaggcaatcctacttcaagtttccatgaagaaaacctcatctgcagcaccctggacctcttctttgccggaaccgagacaacttccacaactctgcgatgggctctgctttatatggccctctacccagaaatccaagaaaaagtacaagtcgagattgacagagtgattggccaggggcagcagccgagcacagccgcccgggagtccatgccctacaccaatgctgtcatccatgaggtgcagagaatgggcaacatcatcccccagaacgttcccagggaagtgacagttgataccactttggctgggtaccacctgcccaagggtaccatgatcctgaccaatttgacggcgctgcacagggaccccacagagtgggccacccctgacacattcaatccggaccattttctggagaatggacagtttaagaaaagggaagcctttatgcctttctcaataggaaagcgggcatgcctcggagaacagttggccaggactgagctgtttattttcttcacttcccttatgcaaaaatttaccttcaggcccccaaacaatgagaagctgagcctgaagtttagaatgggtatcaccatttccccagtcagtcaccgcctctgcgctgttcctcaggtgtaatattgttaagaaagaaaggggcaaggaaagcaagaagacatggcacgtgttctgaaaccactggtgtctgctcagatgtgttgggacaaaatgaaagtgactttcaagaaagatcagaggaatttgactcagagaaaactagatccaaatcccagctctactgtctctcccgaattagccttgggaaaatcatttatatgctaaataatttacctttttatctaggagatgaaaagaggataatgtttccttccataaagaaagttcttgtaagaatcaaaagaaatggtgagctttaagtggtttgtaaaccataaaacacatcataaaagttctatctata

SEQ ID NO: 903 - DNA, 3609 bp; single-stranded, linear
  immediate source library: GENBANK
  immediate source clone: g1185462
ggcacgaggagccctgagagtccgccgccaacgcgcaggtgctagcggccccttcgccctgcagcccctttgcttttactctgtccaaagttaacatgtcactgaaaaacgagccacgggtaaatacctctgcactgcagaaaattgctgctgacatgagtaatatcatagaaaatctggacacgcgggaactccactttgagggagaggaggtagactacgacgtgtctcccagcgatcccaagatacaagaagtgtatatccctttctctgctatttataacactcaaggatttaaggagcctaatatacagacgtatctctccggctgtccaataaaagcacaagttctggaagtggaacgcttcacatctacaacaagggtaccaagtattaatctttacactattgaattaacacatggggaatttaaatggcaagttaagaggaaattcaagcattttcaagaatttcacagagagctgctcaagtacaaagcctttatccgcatccccattcccactagaagacacacgtttaggaggcaaaacgtcagagaggagcctcgagagatgcccagtttgccccgttcatctgaaaacatgataagagaagaacaattccttggtagaagaaaacaactggaagattacttgacaaagatactaaaaatgcccatgtatagaaactatcatgccacaacagagtttcttgatataagccagctgtctttcatccatgatttgggaccaaagggcatagaaggtatgataatgaaaagatctggaggacacagaataccaggcttgaattgctgtggtcagggaagagcctgctacagatggtcaaaaagatggttaatagtgaaagattcctttttattgtatatgaaaccagacagcggtgccattgccttcgtcctgctggtagacaaagaattcaaaattaaggtggggaagaaggagacagaaacgaaatatggaatccgaattgataatctttcaaggacacttattttaaaatgcaacagctatagacatgctcggtggtggggaggggctatagaagaattcatccagaaacatggcaccaactttctcaaagatcatcgatttgggtcatatgctgctatccaagagaatgctttagctaaatggtatgttaatgccaaaggatattttgaagatgtggcaaatgcaatggaagaggcaaatgaagagatttttatcacagactggtggctgagtccagaaatcttcctgaaacgcccagtggttgagggaaatcgttggaggttggactgcattcttaaacgaaaagcacaacaaggagtgaggatcttcataatgctctacaaagaggtggaactcgctcttggcatcaatagtgaatacaccaagaggactttgatgcgtctacatcccaacataaaggtgatgagacacccggatcatgtgtcatccaccgtctatttgtgggctcaccatgagaagcttgtcatcattgaccaatcggtggcctttgtgggagggattgacctggcctatggaaggtgggacgacaatgagcacagactcacagacgtgggcagtgtgaagcgggtcacttcaggaccgtctctgggttccctcccacctgccgcaatggagtctatggaatccttaagactcaaagataaaaatgagcctgttcaaaacctacccatccagaagagtattgatgatgtggattcaaaactgaaaggaataggaaagccaagaaagttctccaaatttagtctctacaagcagctccacaggcaccacctgcacgacgcagatagcatcagcagcattgacagcacctccagttattttaatcactatagaagtcatcacaatttaatccatggtttaaaaccccacttcaaactctttcacccgtccagtgagtctgagcaaggactcactagacctcatgctgataccgggtccatccgtagtttacagacaggtgtgggagagctgcatggggaaaccagattctggcatggaaaggactactgcaatttcgtcttcaaagactgggttcaacttgataaaccttttgctgatttcattgacaggtactccacgccccggatgccctggcatgacattgcctctgcagtccacgggaaggcggctcgtgatgtggcacgtcacttcatccagcgctggaacttcacaaaaattatgaaatcaaaatatcggtccctttcttatccttttctgcttccaaagtctcaaacaacagcccatgagttgagatatcaagtgcctgggtctgtccatgctaacgtacagttgctccgctctgctgctgattggtctgctggtataaagtaccatgaagagtccatccacgccgcttacgtccatgtgatagagaacagcaggcactatatctatatcgaaaaccagtttttcataagctgtgctgatgacaaagttgtgttcaacaagataggcgatgccattgcccagaggatcctgaaagctcacagggaaaaccagaaataccgggtatatgtcgtgataccacttctgccagggttcgaaggagacatttcaaccggcggaggaaatgctctacaggcaatcatgcacttcaactacagaaccatgtgcagaggagaaaattccatccttggacagttaaaagcagagcttggtaatcagtggataaattacatatcattctgtggtcttagaacacatgcagagctcgaaggaaacctagtaactgagcttatctatgtccacagcaagttgttaattgctgatgataacactgttattattggctctgccaacataaatgaccgcagcatgctgggaaagcgtgacagtgaaatggctgtcattgtgcaagatacagagactgttccttcagtaatggatggaaaagagtaccaagctggccggtttgcccgaggacttcggctacagtgctttagggttgtccttggctatcttgatgacccaagtgaggacattcaggatccagtgagtgacaaattcttcaaggaggtgtgggtttcaacagcagctcgaaatgctacaatttatgacaaggttttccggtgccttcccaatgatgaagtacacaatttaattcagctgagagactttataaacaagcccgtattagctaaggaagatcccattcgagctgaggaggaactgaagaagatccgtggatttttggtgcaattccccttttatttcttgtctgaagaaagcctactgccttctgttgggaccaaagaggccatagtgcccatggaggtttggacttaagagatattcattggcagctcaaagacttccaccctggagaccacactgcacacagtgacttcctggggatgtcatagccaaagccaggcctgacgcattctcgtatccaacccaaggaccttttggaatgactggggagggctgcagtcacattgatgtaaggactgtaaacatcagcaagactttataattccttctgcctaacttgtaaaaagggggctgcattcttgttggtagcatgtactctgttgagtaaaacacatattcaaattccgctcgtgccgaattc

SEQ ID NO: 904 - DNA, 1824 bp; single-stranded, linear
  immediate source library: GENBANK
  immediate source clone: g1196416
agcggcctgcagctcgcaggcgccgcgtagccgtcgccaccgccgccagcccgtgcgccctcggcggtacccgccgcgctcccatccccgccgccggccaggggcgcgctcggccgccccggacagtgtcccgctgcggctccgcggcgatggccaccaagatcgacaaagaggcttgccgggcggcgtacaacctggtgcgcgacgacggctcggccgtcatctgggtgacttttaaatatgacggctccaccatcgtccccggcgagcagggagcggagtaccagcacttcatccagcagtgcacagatgacgtccggttgtttgccttcgtgcgcttcaccaccggggatgccatgagcaagaggtccaagtttgccctcatcacgtggatcggtgagaacgtcagcgggctgcagcgcgccaaaaccgggacggacaagaccctggtgaaggaggtcgtacagaatttcgctaaggagtttgtgatcagtgatcggaaggagctggaggaagatttcatcaagagcgagctgaagaaggcggggggagccaattacgacgcccagacggagtaaccccagcccccgccacaccaccccttgccaaagtcatctgcctgctccccgggggagaggaccgccggcctcagctactagcccaccagcccaccagggagaagagaagccatgagaggcagcgcccgccaccctgtgtccacagcccccaccttcccgcttcccttagaaccctgccgtgtcctatctcatgacgctcatggaacctctttctttgatcttctttttcttttctccccctcttttttgttctaaagaaaagtcattttgatgcaaggtcctgcctgccatcagatccgaggtgcctcctgcagtgaccccttttcctggcatttctcttccacgcgacgaggtctgcctagtgagatctgcatgacctcacgttgctttccagagcccgggcctattttgccatctcagttttcctgggccctgcttcctgtgtaccactgaggggcagctgggccaggagctgtgcccggtgcctgcagccttcataagcacacacgtccattccctactaaggcccagacctcctggtatctgccccgggctccctcatcccacctccatccggagttgcccaagatgcatgtccagcataggcaggattgctcggtggtgagaaggttaggtccggctcagactgaataagaagagataaaatttgccttaaaacttacctggcagtggctttgctgcacggtctgaaaccacctgttcccaccctcttgaccgaaatttccttgtgacacagagaagggcaaaggtcttgagcccagagttgacggagggagtatttcagggttcacttcaggggctcccaaagcgacaagatcgttagggagagaggcccagggtggggactgggaatttaaggagagctgggaacggatcccttaggttcaggaagcttctgtgcaagctgcgaggatggcttgggccgaagggttgctctgcccgccgcgctagctgtgagctgagcaaagccctgggctcacagcaccccaaaagcctgtggcttcagtcctgcgtctgcaccacacaatcaaaaggatcgttttgttttgtttttaaagaaaggtgagattggcttggttcttcatgagcacatttgatatagctctttttctgtttttccttgctcatttcgttttggggaagaaatctgtactgtattgggattgtaaagaacatctctgcactcagacagtttacagaaataaatgttttttttgtttttcag

SEQ ID NO: 905 - DNA, 1201 bp; single-stranded, linear
  immediate source library: GENBANK
  immediate source clone: g1199579
tttttcttcttctatcacagggagaagtgaaatgacaacctcactagatacagttgagacctttggtaccacatcctactatgatgacgtgggcctgctctgtgaaaaagctgataccagagcactgatggcccagtttgtgcccccgctgtactccctggtgttcactgtgggcctcttgggcaatgtggtggtggtgatgatcctcataaaatacaggaggctccgaattatgaccaacatctacctgctcaacctggccatttcggacctgctcttcctcgtcacccttccattctggatccactatgtcagggggcataactgggtttttggccatggcatgtgtaagctcctctcagggttttatcacacaggcttgtacagcgagatctttttcataatcctgctgacaatcgacaggtacctggccattgtccatgctgtgtttgcccttcgagcccggactgtcacttttggtgtcatcaccagcatcgtcacctggggcctggcagtgctagcagctcttcctgaatttatcttctatgagactgaagagttgtttgaagagactctttgcagtgctctttacccagaggatacagtatatagctggaggcatttccacactctgagaatgaccatcttctgtctcgttctccctctgctcgttatggccatctgctacacaggaatcatcaaaacgctgctgaggtgccccagtaaaaaaaagtacaaggccatccggctcatttttgtcatcatggcggtgtttttcattttctggacaccctacaatgtggctatccttctctcttcctatcaatccatcttatttggaaatgactgtgagcggagcaagcatctggacctggtcatgctggtgacagaggtgatcgcctactcccactgctgcatgaacccggtgatctacgcctttgttggagagaggttccggaagtacctgcgccacttcttccacaggcacttgctcatgcacctgggcagatacatcccattccttcctagtgagaagctggaaagaaccagctctgtctctccatccacagcagagccggaactctctattgtgttttaggtcagatgcagaaaattgcctaaagaggaaggaccaaggagatgaagcaaacacattaagccttccacactcacctctaaaacagtccttcaaacttccagt

SEQ ID NO: 906 - DNA, 3522 bp; single-stranded, linear
  immediate source library: GENBANK
  immediate source clone: g1206008
gccatttgaagcagaatccaaaccatgaattgtagagaattacccttgaccctttgggtgcttatatctgtaagcactgcagaatcttgtacttcacgtccccacattactgtggttgaaggggaacctttctatctgaaacattgctcgtgttcacttgcacatgagattgaaacaaccaccaaaagctggtacaaaagcagtggatcacaggaacatgtggagctgaacccaaggagttcctcgagaattgctttgcatgattgtgttttggagttttggccagttgagttgaatgacacaggatcttactttttccaaatgaaaaattatactcagaaatggaaattaaatgtcatcagaagaaataaacacagctgtttcactgaaagacaagtaactagtaaaattgtggaagttaaaaaattttttcagataacctgtgaaaacagttactatcaaacactggtcaacagcacatcattgtataagaactgtaaaaagctactactggagaacaataaaaacccaacgataaagaagaacgccgagtttgaagatcaggggtattactcctgcgtgcatttccttcatcataatggaaaactatttaatatcaccaaaaccttcaatataacaatagtggaagatcgcagtaatatagttccggttcttcttggaccaaagcttaaccatgttgcagtggaattaggaaaaaacgtaaggctcaactgctctgctttgctgaatgaagaggatgtaatttattggatgttcggggaagaaaatggatcggatcctaatatacatgaagagaaagaaatgagaattatgactccagaaggcaaatggcatgcttcaaaagtattgagaattgaaaatattggtgaaagcaatctaaatgttttatataattgcactgtggccagcacgggaggcacagacaccaaaagcttcatcttggtgagaaaagcagacatggctgatatcccaggccacgtcttcacaagaggaatgatcatagctgttttgatcttggtggcagtagtgtgcctagtgactgtgtgtgtcatttatagagttgacttggttctattttatagacatttaacgagaagagatgaaacattaacagatggaaaaacatatgatgcttttgtgtcttacctaaaagaatgccgacctgaaaatggagaggagcacacctttgctgtggagattttgcccagggtgttggagaaacattttgggtataagttatgcatatttgaaagggatgtagtgcctggaggagctgttgttgatgaaatccactcactgatagagaaaagccgaagactaatcattgtcctaagtaaaagttatatgtctaatgaggtcaggtatgaacttgaaagtggactccatgaagcattggtggaaagaaaaattaaaataatcttaattgaatttacacctgttactgacttcacattcttgccccaatcactaaagcttttgaaatctcacagagttctgaagtggaaggccgataaatctctttcttataactcaaggttctggaagaaccttctttacttaatgcctgcaaaaacagtcaagccaggtagagacgaaccggaagtcttgcctgttctttccgagtcttaatcttcagaaacagtgaacgccaaaaagaactcaagatattctggggactgagcatatgaacctgttcataacaaaggctgtgactcgaaataattaactttgtcaaaatcctgctcacaatttgaagatgaaacttgtcattaggttggcgggaatgagactaaagattgcgctgtgggctgtggtcacgtgctcccagaagacctggaattcaaaagaaatggagctattctttttctccctctttcataactggatgcagctgctcatactcaatcccatattcagcaagtgtgaagctggacgtgatgcaaaataaccgatgccctacaaaaagggcgcatctttaagagttttaatgccagtgcttaattcgaatgaggggattttaagtgtctgaagaggcattttctagggaccagtgggtgactgagtaactgaaatgctgctttcactccctaacaccatggatctggttgtgcataggatgtgggaggaggggctggcagggccgccttcagaggctgcagggcctcagcctcaggatgcatttaatgtatcctggccacagttgcagccaacggttcttgaaagctcggtaaggccctgcaacgcagagcctgcttatgtggatctatttatgggaacttcttaaaaggaccccagaatagctctttatctttcacaagagacacaaattctaattgagttaattatctgggcctttcactttggatgctctgaaacatttgttgattttgtgtgaatgtttatatcaaaatgtttgccaggttgtattagccattgaatagcaaaaaactgatagttacttgcttgttttttaaaaattacatattaaaaatgcccttggcataaggcagcatggtgtggcagttaagagatgggctgtgcagcccatcctgagctccagtcctgagtttgctacttacttctgtggcctctggaaccttatccaacctcttggtgcttcagtttcctcatctgtgaaattagaatttataataattgcacctacctcccaggggtaactaaatgaataaatataataaagtacttacagtggttcctgacacagactcagcactccgtcagtgttgccatgactatttttattatcattattaatgattacttagatcaattatttagcagtggactaatggaagctacagagcagggaagggaagcagatctagggaggaaggcagttttgatttgaggaggtttgcacatgtagagaagcatactggagaagcatatccagagggcgaaagatatctctccattgtgcatctgcctcttttgacgttggaagacacatgtcttactccccaaagggagcccagcactgggagccttcttgatgatctcaaaaataatagctattcaagaaaatcaccaagtgactgtgaaaccgtcagttcggaaggctggttagaacatgtgggagcaacatgaatgttctacaaaagtttaaagcagagattgtttcaaatgggtgtagtagatattactgaaaaccaaaaaagagtgagattgtcagtgtaagaatgtgatttaatgtttgtagtgcttacaattttgtgtaccaactggatgactaaaaagagtaaaataacttaattaatagctcatattttatgtgtgaaaacatgttagtgaacatatataatcaaaatagatttcattgctattgcatagtctctaatacatagaatgattttgcttttctcttttattatacttgctttaaaatacttgaaatatattttgcattaaatgcatttcaagttaaatgtcttaaatgtatacattagatgtgtgttttaaaatgcataaaacacgttgaaa

SEQ ID NO: 907 - DNA, 1363 bp; single-stranded, linear
  immediate source library: GENBANK
  immediate source clone: g1215680
cttcccatgcagtggccccagggtctgaatccagctcggtagcctcaggcctgggcataccatggcagagtccatcaactgctgcctgttatctaattgcagatcaagtcctgctactacctgccttgctttgtgacttccaagaacgagtgtctctggaccgacatgctctccaatttcggttaccctggctaccagtccaaacactacgcctgcatccggcagaagggcggctactgcagctggtaccgaggatgggcccccccggataaaagcatcatcaatgccacagacccctgagcgccagaccctgccccacctcacttccctcccttcccgctgagcttcccttggacactaactcttcccagatgatgacaatgaaattagtgcctgttttcttgcaaatttagcacttggaacatttaaagaaaggtctatgctgtcatatggggtttattgggaactatcctcctggccccaccctgccccttctttttggttttgacatcattcatttccacctgggaatttctggtgccatgccagaaagaatgaggaacctgtattcctcttcttcgtgataatataatctctatttttttaggaaaacaaaaatgaaaaactactccatttgaggattgtaattcccacccctcttgcttcttccccacctcaccatctcccagaccctcttccctttgcccttctcctccaatacataaaggacacagacaaggaacttgctgaaaggccaaccatttcaggatcagtcaaaggcagcaagcagatagactcaaggtgtgtgaaagatgttatacaccaggagctgccactgcatgtcccaaccagactgtgtctgtctgtgtctgcatgtaagagtgagggagggaaggaaggaactacaagagagtcggagatgatgcagcacacacacaattccccagcccagtgatgcttgtgttgaccagatgttcctgagtctggagcaagcacccaggccagaataacagagctttcttagttggtgaagacttaaacatctgcctgaggtcaggaggcaatttgcctgccttgtacaaaagctcaggtgaaagactgagatgaatgtctttcctctccctgcctcccaccagacttcctcctggaaaacgctttggtagatttggccaggagctttcttttatgtaaattggataaatacacacaccatacactatccacagatatagccaagtagatttgggtagaggatactatttccagaatagtgtttagctcacctagggggatatgtttgtatacacatttgcatatacccacatggggacataagctaatttttttacaggacacagaattc

SEQ ID NO: 908 - DNA, 1847 bp; single-stranded, linear
  immediate source library: GENBANK
  immediate source clone: g1220363
tctccgtcagccgcattgcccgctcggcgtccggcccccgacccgtgctcgtccgcccgcccgcccgcccgcccgcgccatgaacgccaaggtcgtggtcgtgctggtcctcgtgctgaccgcgctctgcctcagcgacgggaagcccgtcagcctgagctacagatgcccatgccgattcttcgaaagccatgttgccagagccaacgtcaagcatctcaaaattctcaacactccaaactgtgcccttcagattgtagcccggctgaagaacaacaacagacaagtgtgcattgacccgaagctaaagtggattcaggagtacctggagaaagctttaaacaagtaagcacaacagccaaaaaggactttccgctagacccactcgaggaaaactaaaaccttgtgagagatgaaagggcaaagacgtgggggagggggccttaaccatgaggaccaggtgtgtgtgtggggtgggcacattgatctgggatcgggcctgaggtttgcagcatttagaccctgcatttatagcatacggtatgatattgcagcttatattcatccatgccctgtacctgtgcacgttggaacttttattactggggtttttctaagaaagaaattgtattatcaacagcattttcaagcagttagttccttcatgatcatcacaatcatcatcattctcattctcattttttaaatcaacgagtacttcaagatctgaatttggcttgtttggagcatctcctctgctcccctggggagtctgggcacagtcaggtggtggcttaacagggagctggaaaaagtgtcctttcttcagacactgaggctcccgcagcagcgcccctcccaagaggaaggcctctgtggcactcagataccgactggggctggggcgccgccactgccttcacctcctctttcaaacctcagtgattggctctgtgggctccatgtagaagccactattactgggactgtctcagagacccctctcccagctattcctactctctccccgactccgagagcatgcttaatcttgcttctgcttctcatttctgtagcctgatcagcgccgcaccagccgggaagagggtgattgctggggctcgtgccctgcatccctctcctcccagggcctgccccacagctcgggccctctgtgagatccgtctttggcctcctccagaatggagctggccctctcctggggatgtgtaatggtccccctgcttacccgcaaaagacaagtctttacagaatcaaatgcaattttaaatctgagagctcgcttgagtgactgggtttgtgattgcctctgaagcctatgtatgccatggaggcactaacaaactctgaggtttccgaaatcagaagcgaaaaaatcagtgaataaaccatcatcttgccactaccccctcctgaagccacagcaggggttcaggttccaatcagaactgttggcaaggtgacatttccatgcatagatgcgatccacagaaggtcctggtggtatttgtaactttttgcaaggcatttttttatatatatttttgtgcacatttttttttacgattctttagaaaacaaatgtatttcaaaatatatttatagtcgaacaagtcatatatatgaatgagagccatatgaatgtcagtagtttatacttctctattatctcaaactactggcaatttgtaaagaaatatatatgatatataaatgtgattgcagcttttcaatgttagccacagtgtattttttcacttgtactaaaattgtatcaaatgtgacattatatgcactagcaataaaatgctaattgtttcatggta

SEQ ID NO: 909 - DNA, 1160 bp; single-stranded, linear
  immediate source library: GENBANK
  immediate source clone: g1235723
gcgcgggccgaccgggcgcaccgaccatggcctccaaatgccccaagtgcgacaagaccgtgtacttcgccgagaaggtgagctccctggggaaggactggcacaagttctgcctcaagtgcgagcgctgcagcaagacgctgacgcccgggggccacgccgagcatgacgggaagccgttctgccacaagccgtgctacgccaccctgttcggacccaaaggcgtgaacatcgggggcgcgggctcctacatctacgagaagcccctggcggaggggccgcaggtcaccggccccatcgaggtccccgcggcccgagcagaggagcggaaggcgagcggccccccgaaggggcccagcagagcctccagtgtcaccactttcaccggggagcccaacacgtgcccgcgctgcagcaagaaggtgtacttcgctgagaaggtgacgtctctgggcaaggattggcaccggccctgcctgcgctgcgagcgctgcgggaagacactgacccccggcgggcacgcggagcacgacggccagccctactgccacaagccctgctatggaatcctcttcggacccaagggagtgaacaccggtgcggtgggcagctacatctatgaccgggaccccgaaggcaaggtccagccctaggctacagcggctctcatgatgtgggctcacctgcgccccagaccctgcaggggcccccctgcttggctctgctgggagagtgctcagccgcccagtcctgcctgcaagcccagggcgagtattggaggaggggcagccacgggcagagcaccatgcccatccccgagtctctggtgtgtctgccccctctggcatcctctgggcgtcccatgatcccttctgtgtctgcgtgtccgaatccccgtgtgaccctgtcccagcattttcccgccgaccctgcgtgtccccgtggcgctgtccgctctccctctcctgctgcccacccacctgccagtgttatttatgctcccttcgtgggtgatggccacgccctcaccatgtccctggcagagggcttcctccgggatcccctgcctggtgcccacactgcctcgcaagcgctcgccaccctcacgtggctcacctgctgttgagccttgtgctgtcaataaacggtttgaggattgc

SEQ ID NO: 910 - DNA, 8210 bp; single-stranded, linear
  immediate source library: GENBANK
  immediate source clone: g1235901
gcctccacacggctccgtcgggcgccgcgctcttccggcagcggtagctttggagacgccgggaacccgcgttggcgtggttgactagtgcctcgcagcctcagcatgggggaacatggcctggagctggcttccatgatccccgccctgcgggagctgggcagtgccacaccagaggaatataatacagttgtacagaagccaagacaaattctgtgtcaattcattgaccggatacttacagatgtaaatgttgttgctgtagaacttgtaaagaaaactgactctcagccaacctccgtgatgttgcttgatttcatccagcatatcatgaaatcctccccacttatgtttgtaaatgtgagtggaagccatgaggccaaaggcagttgtattgaattcagtaattggatcataacgagacttctgcggattgcagcaactccctcctgtcatttgttacacaagaaaatctgtgaagtcatctgttcattattatttctttttaaaagcaagagtcctgctatttttggggtactcacaaaagaattattacaactttttgaagacttggtttacctccatagaagaaatgtgatgggtcatgctgtggaatggccagtggtcatgagccgatttttaagtcaattagatgaacacatgggatatttacaatcagctcctttgcagttgatgagtatgcaaaatttagaatttattgaagtcactttattaatggttcttactcgtattattgcaattgtgttttttagaaggcaagaactcttactttggcagataggttgtgttctgctagagtatggtagtccaaaaattaaatccctagcaattagctttttaacagaactttttcagcttggaggactaccagcacaaccagctagcacttttttcagctcatttttggaattattaaaacaccttgtagaaatggatactgaccaattgaaactctatgaagagccattatcaaagctgataaagacactatttccctttgaagcagaagcttatagaaatattgaacctgtctatttaaatatgctgctggaaaaactctgtgtcatgtttgaagacggtgtgctcatgcggcttaagtctgatttgctaaaagcagctttgtgccatttactgcagtatttccttaaatttgtgccagctgggtatgaatctgctttacaagtcaggaaggtctatgtgagaaatatttgtaaagctcttttggatgtgcttggaattgaggtagatgcagagtacttgttgggcccactttatgcagctttgaaaatggaaagtatggaaatcattgaggagattcaatgccaaactcaacaggaaaacctcagcagtaatagtgatggaatatcacccaaaaggcgtcgtctcagctcgtctctaaacccttctaaaagagcaccaaaacagactgaggaaattaaacatgtggacatgaaccaaaagagcatattatggagtgcactgaaacagaaagctgaatcccttcagatttcccttgaatacagtggcctaaagaatcctgttattgagatgttagaaggaattgctgttgtcttacaactgactgctctgtgtactgttcattgttctcatcaaaacatgaactgccgtactttcaaggactgtcaacataaatccaagaagaaaccttctgtagtgataacttggatgtcattggatttttacacaaaagtgcttaagagctgtagaagtttgttagaatctgttcagaaactggacctggaggcaaccattgataaggtggtgaaaatttatgatgctttgatttatatgcaagtaaacagttcatttgaagatcatatcctggaagatttatgtggtatgctctcacttccatggatttattcccattctgatgatggctgtttaaagttgaccacatttgccgctaatcttctaacattaagctgtaggatttcagatagctattcaccacaggcacaatcacgatgtgtgtttcttctgactctgtttccaagaagaatattccttgagtggagaacagcagtttacaactgggccctgcagagctcccatgaagtaatccgggctagttgtgttagtggattttttatcttattgcagcagcagaattcttgtaacagagttcccaagattcttatagataaagtcaaagatgattctgacattgtcaagaaagaatttgcttctatacttggtcaacttgtctgtactcttcacggcatgttttatctgacaagttctttaacagaacctttctctgaacacggacatgtggacctcttctgtaggaacttgaaagccacttctcaacatgaatgttcatcttctcaactaaaagcttctgtctgcaagccattccttttcctactgaaaaaaaaaatacctagtccagtaaaacttgctttcatagataatctacatcatctttgtaagcatcttgattttagagaagatgaaacagatgtaaaagcagttcttggaactttattaaatttaatggaagatccagacaaagatgttagagtggcttttagtggaaatatcaagcacatattggaatccttggactctgaagatggatttataaaggagctttttgtcttaagaatgaaggaagcatatacacatgcccaaatatcaagaaataatgagctgaaggataccttgattcttacaacaggggatattggaagggccgcaaaaggagatttggtaccatttgcactcttacacttattgcattgtttgttatccaagtcagcatctgtctctggagcagcatacacagaaattagagctctggttgcagctaaaagtgttaaactgcaaagttttttcagccagtataagaaacccatctgtcagtttttggtagaatcccttcactctagtcagatgacagcacttccgaatactccatgccagaatgctgacgtgcgaaaacaagatgtggctcaccagagagaaatggctttaaatacgttgtctgaaattgccaacgttttcgactttcctgatcttaatcgttttcttactaggacattacaagttctactacctgatcttgctgccaaagcaagccctgcagcttctgctctcattcgaactttaggaaaacaattaaatgtcaatcgtagagagattttaataaacaacttcaaatatattttttctcatttggtctgttcttgttccaaagatgaattagaacgtgcccttcattatctgaagaatgaaacagaaattgaactggggagcctgttgagacaagatttccaaggattgcataatgaattattgctgcgtattggagaacactatcaacaggtttttaatggtttgtcaatacttgcctcatttgcatccagtgatgatccatatcagggcccgagagatatcatatcacctgaactgatggctgattatttacaacccaaattgttgggcattttggctttttttaacatgcagttactgagctctagtgttggcattgaagataagaaaatggccttgaacagtttgatgtctttgatgaagttaatgggacccaaacatgtcagttctgtgagggtgaagatgatgaccacactgagaactggccttcgattcaaggatgattttcctgaattgtgttgcagagcttgggactgctttgttcgctgcctggatcatgcttgtctgggctcccttctcagtcatgtaatagtagctttgttacctcttatacacatccagcctaaagaaactgcagctatcttccactacctcataattgaaaacagggatgctgtgcaagattttcttcatgaaatatattttttacctgatcatccagaattaaaaaagataaaagccgttctccaggaatacagaaaggagacctctgagagcactgatcttcagacaactcttcagctctctatgaaggccattcaacatgaaaatgtcgatgttcgtattcatgctcttacaagcttgaaggaaaccttgtataaaaatcaggaaaaactgataaagtatgcaacagacagtgaaacagtagaacctattatctcacagttggtgacagtgcttttgaaaggttgccaagatgcaaactctcaagctcggttgctctgtggggaatgtttaggggaattgggggcgatagatccaggtcgattagatttctcaacaactgaaactcaaggaaaagattttacatttgtgactggagtagaagattcaagctttgcctatggattattgatggagctaacaagagcttaccttgcgtacgctgataatagccgagctcaagattcagctgcctatgccattcaggagttgctttctatttatgactgtagagagatggagaccaacggcccaggtcaccaattgtggaggagatttcctgagcatgttcgggaaatactagaacctcatctaaataccagatacaagagttctcagaagtcaaccgattggtctggagtaaagaagccaatttacttaagtaaattgggtagtaactttgcagaatggtcagcatcttgggcaggttatcttattacaaaggttcgacatgatcttgccagtaaaattttcacctgctgtagcattatgatgaagcatgatttcaaagtgaccatctatcttcttccacatattctggtgtatgtcttactgggttgtaatcaagaagatcagcaggaggtttatgcagaaattatggcagttctaaagcatgacgatcagcataccataaatacccaagacattgcatctgatctgtgtcaactcagtacacagactgtgttctccatgcttgaccatctcacacagtgggcaaggcacaaatttcaggcactgaaagctgagaaatgtccacacagcaaatcaaacagaaataaggtagactcaatggtatctactgtggattatgaagactatcagagtgtaacccgttttctagacctcataccccaggatactctggcagtagcttcctttcgctccaaagcatacacacgagctgtaatgcactttgaatcatttattacagaaaagaagcaaaatattcaggaacatcttggatttttacagaaattgtatgctgctatgcatgaacctgatggagtggccggagtcagtgcaattagaaaggcagaaccatctctaaaagaacagatccttgaacatgaaagccttggcttgctgagggatgccactgcttgttatgacagggctattcagctagaaccagaccagatcattcattatcatggtgtagtaaagtccatgttaggtcttggtcagctgtctactgttatcactcaggtgaatggagtgcatgctaacaggtccgagtggacagatgaattaaacacgtacagagtggaagcagcttggaaattgtcacagtgggatttggtggaaaactatttggcagcagatggaaaatctacaacatggagtgtcagactgggacagctattattatcagccaaaaaaagagatatcacagctttttatgactcactgaaactagtgagagcagaacaaattgtacctctttcagctgcaagctttgaaagaggctcctaccaacgaggatatgaatatattgtgagattgcacatgttatgtgagttggagcatagcatcaaaccacttttccagcattctccaggtgacagttctcaagaagattctctaaactgggtagctcgactagaaatgacccagaattcctacagagccaaggagcctatcctggctctccggagggctttactaagcctcaacaaaagaccagattacaatgaaatggttggagaatgctggctgcagagtgccagggtagctagaaaggctggtcaccaccagacagcctacaatgctctccttaatgcaggggaatcacgactcgctgaactgtacgtggaaagggcaaagtggctctggtccaagggtgatgttcaccaggcactaattgttcttcaaaaaggtgttgaattatgttttcctgaaaatgaaaccccacctgagggtaagaacatgttaatccatggtcgagctatgctactagtgggccgatttatggaagaaacagctaactttgaaagcaatgcaattatgaaaaaatataaggatgtgaccgcgtgcctgccagaatgggaggatgggcatttttaccttgccaagtactatgacaaattgatgcccatggtcacagacaacaaaatggaaaagcaaggtgatctcatccggtatatagttcttcattttggcagatctctacaatatggaaatcagttcatatatcagtcaatgccacgaatgttaactctatggcttgattatggtacaaaggcatatgaatgggaaaaagctggccgctccgatcgtgtacaaatgaggaatgatttgggtaaaataaacaaggttatcacagagcatacaaactatttagctccatatcaatttttgactgctttttcacaattgatctctcgaatttgtcattctcacgatgaagtttttgttgtcttgatggaaataatagccaaagtatttctagcctatcctcaacaagcaatgtggatgatgacagctgtgtcaaagtcatcttatcccatgcgtgtgaacagatgcaaggaaatcctcaataaagctattcatatgaaaaaatccttagagaagtttgttggagatgcaactcgcctaacagataagcttctagaattgtgcaataaaccggttgatggaagtagttccacattaagcatgagcactcattttaaaatgcttaaaaagctggtagaagaagcaacatttagtgaaatcctcattcctctacaatcagtcatgatacctacacttccatcaattctgggtacccatgctaaccatgctagccatgaaccatttcctggacattgggcctatattgcagggtttgatgatatggtggaaattcttgcttctcttcagaaaccaaagaagatttctttaaaaggctcagatggaaagttctacatcatgatgtgtaagccaaaagatgacctgagaaaggattgtagactaatggaattcaattccttgattaataagtgcttaagaaaagatgcagagtctcgtagaagagaacttcatattcgaacatatgcagttattccactaaatgatgaatgtgggattattgaatgggtgaacaacactgctggtttgagacctattctgaccaaactatataaagaaaagggagtgtatatgacaggaaaagaacttcgccagtgtatgctaccaaagtcagcagctttatctgaaaaactcaaagtattccgagaatttctcctgcccaggcatcctcctatttttcatgagtggtttctgagaacattccctgatcctacatcatggtacagtagtagatcagcttactgccgttccactgcagtaatgtcaatggttggttatattctggggcttggagaccgtcatggtgaaaatattctctttgattctttgactggtgaatgcgtacatgtagatttcaattgtcttttcaataagggagaaacctttgaagttccagaaattgtgccatttcgcctgactcataatatggttaatggaatgggtcctatgggaacagagggtctttttcgaagagcatgtgaagttacaatgaggctgatgcgtgatcagcgagagcctttaatgagtgtcttaaagacttttctacatgatcctcttgtggaatggagtaaaccagtgaaagggcattccaaagcgccactgaatgaaactggagaagttgtcaatgaaaaggccaagacccatgttcttgacattgagcagcgactacaaggtgtaatcaagactcgaaatagagtgacaggactgccgttatctattgaaggacatgtgcattaccttatacaggaagctactgatgaaaacttactatgccagatgtatcttggttggactccatatatgtgaaatgaaattatgtaaaagaatatgttaataatctaaaagtaatgcatttggtatgaatctgtggttgtatctgttcaattctaaagtacaacataaatttacgttctcagcaactgttatttctctctgatcattaattatatgtaaaataatatacattcactcgtgcc

SEQ ID NO: 911 - DNA, 1971 bp; single-stranded, linear
  immediate source library: GENBANK
  immediate source clone: g1236078
gaattccgcccgcccacggcggcggggaaatacctaggcatggaagtggcatgacagggctcgtgtccctgtcatattttccactctccacgaggtcctgcgcgcttcaatcctgcaggcagcccggtttggggatgtggtccttgctgctctgcgggttgtccatcgcccttccactgtctgtcacagcagatggatgcaaggacatttttatgaaaaatgagatactttcagcaagccagccttttgcttttaattgtacattccctcccataacatctggggaagtcagtgtaacatggtataaaaattctagcaaaatcccagtgtccaaaatcatacagtctagaattcaccaggacgagacttggattttgtttctccccatggaatggggggactcaggagtctaccaatgtgttataaagggtagagacagctgtcatagaatacatgtaaacctaactgtttttgaaaaacattggtgtgacacttccataggtggtttaccaaatttatcagatgagtacaagcaaatattacatcttggaaaagatgatagtctcacatgtcatctgcacttcccgaagagttgtgttttgggtccaataaagtggtataaggactgtaacgagattaaaggggagcggttcactgttttggaaaccaggcttttggtgagcaatgtctcggcagaggacagagggaactacgcgtgtcaagccatactgacacactcagggaagcagtacgaggttttaaatggcatcactgtgagcattacagaaagagctggatatggaggaagtgtccctaaaatcatttatccaaaaaatcattcaattgaagtacagcttggtaccactctgattgtggactgcaatgtaacagacaccaaggataatacaaatctacgatgctggagagtcaataacactttggtggatgattactatgatgaatccaaacgaatcagagaaggggtggaaacccatgtctcttttcgggaacataatttgtacacagtaaacatcaccttcttggaagtgaaaatggaagattatggccttcctttcatgtgccacgctggagtgtccacagcatacattatattacagctcccagctccggattttcgagcttacttgataggagggcttatcgccttggtggctgtggctgtgtctgttgtgtacatatacaacatttttaagatcgacattgttctttggtatcgaagtgccttccattctacagagaccatagtagatgggaagctgtatgacgcctatgtcttataccccaagccccacaaggaaagccagaggcatgccgtggatgccctggtgttgaatatcctgcccgaggtgttggagagacaatgtggatataagttgtttatattcggcagagatgaattccctggacaagccgtggccaatgtcatcgatgaaaacgttaagctgtgcaggaggctgattgtcattgtggtccccgaatcgctgggctttggcctgttgaagaacctgtcagaagaacaaatcgcggtctacagtgccctgatccaggacgggatgaaggttattctcattgagctggagaaaatcgaggactacacagtcatgccagagtcaattcagtacatcaaacagaagcatggtgccatccggtggcatggggacttcacggagcagtcacagtgtatgaagaccaagttttggaagacagtgagataccacatgccgcccagaaggtgtcggccgtttctccggtccacgtgccgcagcacacacctctgtaccgcaccgcaggcccagaactaggctcaagaagaaagaagtgtactctcacgactggctaagacttgctggactgacacctatggctggaagatgacttgttttgctccatgtctcctcattcctacacctattttctgctgcaggatgaggctagggttagcattctaga

SEQ ID NO: 912 - DNA, 1602 bp; single-stranded, linear
  immediate source library: GENBANK
  immediate source clone: g1236232
tcgataagcttgatatcgaattccgatcagggccgagttgtctcggcggcgctgccgaggcctccacccaggacagtccccctccccgggcctctctcctcttgcctacgagtcccctctcctcgtaggcctctcggatctgatatcgtggggtgaggtgagcaggcccggggagggtggttaccgctgaggagctgcagtctctgtcaagatgatagaggtactgacaacaactgactctcagaaactgctacaccagctgaatgccctgttggaacaggagtctagatgtcagccaaaggtctgtggtttgagactaattgagtctgcacacgataatggcctcagaatgactgcaagactaagggactttgaagtaaaagatcttcttagtctaactcagttctttggctttgacacagagacattttctctagctgtgaatttactggacagattcctgtctaaaatgaaggtacagcccaagcaccttgggtgtgttggactgagctgcttttatttggctgtaaaatcaatagaagaggaaaggaatgtcccattggcaactgacttgatccgaataagtcaatataggtttacggtttcagacttgatgagaatggaaaagattgtattggagaaggtgtgttggaaagtcaaagctactactgcctttcaatttctgcaactgtattattcactccttcaagagaacttgccacttgaaaggagaaatagcattaattttgaaagactagaagctcaactgaaggcatgtcattgcaggatcatattttctaaagcaaagccttctgtgttggcattgtctatcattgcattagagatccaagcacagaagtgtgtagagttaacagaaggaatagaatgtcttcagaaacattccaagataaatggcagagatctgaccttctggcaagagcttgtatccaaatgtttaactgaatattcatcaaataagtgttccaaaccaaatgttcagaagttgaaatggattgtttctgggcgtactgcacggcaattgaagcatagctactacagaataactcaccttccaacaattcctgaaatggtcccttaactggattattacagcaccaaaaaacttctctgaagcctttctccacaaccttgttctatggattccataatgttacaatggatttaagctatgaagcctcaaaacatcacgagataagcatgatggtctcagacttgggaaaactgcctaatattatgctgtagtggaattatgtttatgatttgaattcatctgtgaaggcattcaaatcaaagctaaaagcctaaatgtgaaatgctaatgacaagcctgagaaggtaaactatgaatcttcatttctatcattgatctaactttagatattggatcaatatatttaggtggtattgaaaatgctattggaggagtcacactaatactatcaactatcagtcttcccacagcttcaatcactgtcattattctaatcctactcctacttaaattttaagttatgaggtttatgtcgaaagcaacatttcacaaatgtacttttaaggcataataagggttaacattctagg

SEQ ID NO: 913 - DNA, 1410 bp; single-stranded, linear
  immediate source library: GENBANK
  immediate source clone: g1236234
ggtcttacccagcgctggccggcggacctgaccacggctcctccccctgccacacctccctggccgtggtggggattgccctggggctctggcggacgtgactggtcccttcacccgctccttgtcggggtgtgctggggcgacccttgctggaggtactggcctcagccctttctcccgcttccccacccctcttacccccagattacattctctgtgtggtgtctttactgcagatgaaggatttgggggcagagcacttggcaggtcatgaaggggtccaacttctcgggttgttgaacgtctacctggaacaagaagagagattccaacctcgagaaaaagggctgagtttgattgaggctaccccggagaatgataacactttgtgtccaggattgagaaatgccaaagttgaagatttaaggagtttagccaacttttttggatcttgcactgaaacttttgtcctggctgtcaatattttggacaggttcttggctcttatgaaggtgaaacctaaacatttgtcttgcattggagtctgttcttttttgctggctgctagaatagttgaagaagactgcaatattccatccactcatgatgtgatccggattagtcagtgtaaatgtactgcttctgacataaaacggatggaaaaaataatttcagaaaaattgcactatgaattggaagctactactgccttaaactttttgcacttataccatactattatactttgtcatacttcagaaaggaaagaaatactgagccttgataaactagaagctcagctgaaagcttgcaactgccgactcatcttttcaaaagcaaaaccatctgtattagccttgtgccttctcaatttggaagtggaaactttgaaatctgttgaattactggaaattctcttgctagttaaaaaacattccaagattaatgacactgagttcttctactggagagagttggtttctaaatgcctagccgagtattcttctcctgaatgttgcaaaccagatcttaagaagttggtttggatcgtttcaaggcgcacagcccagaacctccacaacagctactatagtgttcctgagctgccaacgatacctgaggggggttgttttgatgaaagtgaaagtgaggactcttgtgaagatatgagttgtggagaggagagtctcagcagctctcctcccagtgatcaagagtgcaccttctttttcaacttcaaagtggcacaaacactgtgctttccatcttagaaatctgattgttctgtcagaatttatatttacaggtttcaaagcaataaatgggggaataggtagtttcctggtttagcccccatctagtcaggaattaatatactggaatacctaccttctatttgttattcagatc

SEQ ID NO: 914 - DNA, 2617 bp; single-stranded, linear
  immediate source library: GENBANK
  immediate source clone: g1236942
atgcaaccagacatgtccttgaatgtcattaagatgaaatccagtgacttcctggagagtgcagaactggacagcggaggctttgggaaggtgtctctgtgtttccacagaacccagggactcatgatcatgaaaacagtgtacaaggggcccaactgcattgagcacaacgaggccctcttggaggaggcgaagatgatgaacagactgagacacagccgggtggtgaagctcctgggcgtcatcatagaggaagggaagtactccctggtgatggagtacatggagaagggcaacctgatgcacgtgctgaaagccgagatgagtactccgctttctgtaaaaggaaggataatttgggaaatcattgaaggaatgtgctacttacatggaaaaggcgtgatacacaaggacctgaagcctgaaaatatccttgttgataatgacttccacattaagatcgcagacctcggccttgcctcctttaagatgtggagcaaactgaataatgaagagcacaatgagctgagggaagtggacggcaccgctaagaagaatggcggcaccctctactacatggcgcccgagcacctgaatgacgtcaacgcaaagcccacagagaagtcggatgtgtacagctttgctgtagtactctgggcgatatttgcaaataaggagccatatgaaaatgctatctgtgagcagcagttgataatgtgcataaaatctgggaacaggccagatgtggatgacatcactgagtactgcccaagagaaattatcagtctcatgaagctctgctgggaagcgaatccggaagctcggccgacatttcctggcattgaagaaaaatttaggcctttttatttaagtcaattagaagaaagtgtagaagaggacgtgaagagtttaaagaaagagtattcaaacgaaaatgcagttgtgaagagaatgcagtctcttcaacttgattgtgtggcagtaccttcaagccggtcaaattcagccacagaacagcctggttcactgcacagttcccagggacttgggatgggtcctgtggaggagtcctggtttgctccttccctggagcacccacaagaagagaatgagcccagcctgcagagtaaactccaagacgaagccaactaccatctttatggcagccgcatggacaggcagacgaaacagcagcccagacagaatgtggcttacaacagagaggaggaaaggagacgcagggtctcccatgacccttttgcacagcaaagaccttacgagaattttcagaatacagagggaaaaggcactgtttattccagtgcagccagtcatggtaatgcagtgcaccagccctcagggctcaccagccaacctcaagtactgtatcagaacaatggattatatagctcacatggctttggaacaagaccactggatccaggaacagcaggtcccagagtttggtacaggccaattccaagtcatatgcctagtctgcataatatcccagtgcctgagaccaactatctaggaaatacacccaccatgccattcagctccttgccaccaacagatgaatctataaaatataccatatacaatagtactggcattcagattggagcctacaattatatggagattggtgggacgagttcatcactactagacagcacaaatacgaacttcaaagaagagccagctgctaagtaccaagctatctttgataataccactagtctgacggataaacacctggacccaatcagggaaaatctgggaaagcactggaaaaactgtgcccgtaaactgggcttcacacagtctcagattgatgaaattgaccatgactatgagcgagatggactgaaagaaaaggtttaccagatgctccaaaagtgggtgatgagggaaggcataaagggagccacggtggggaagctggcccaggcgctccaccagtgttccaggatcgaccttctgagcagcttgatttacgtcagccagaactaaccctggatgggctacggcagctgaagtggacgcctcacttagcggataaccccagaaagttggctgcctcagagcattcagaattctgtcctcactgataggggttctgtgtctgcagaaatttngtttcctgtacttcatagctggagaatggggaaagaaatctgcagcaaaggggtctcactctgttgccaggctggtctcaaacttctggactcaagtgatcctcccgcctcggccttccaaagtgctgggatatcaggcactgagccactgcgcccagtcaacaatccgntctgaggaaagcgtaagcaggaagacctcttaatggcatagcaccaataaaaaaatgactcctagttgtgtttggaaagggagagaagagatgtctgaggaaggtcatgttctttcagcttatggcatttcctagagtttngttgaagcaagaagaaaaactcagagaatataaaatcaactttnaaaattgtgtgctctcttcttcacgtaggctcctgttaaaaacaaagtgcagtcagattctaagccctgttcagagacttcgcggatcacagctgcagctcaccgccacatcacaggatcc

SEQ ID NO: 915 - DNA, 1598 bp; single-stranded, linear
  immediate source library: GENBANK
  immediate source clone: g1244767
atggatttcggactggccctcctgctggcggggcttctggggctcctcctcggccagtccctccaggtgaagcccctgcaggtggagcccccggagccggtggtggccgtggccttgggcgcctcgcgccagctcacctgccgcctggcctgcgcggaccgcggggcctcggtgcagtggcggggcctggacaccagcctgggcgcggtgcagtcggacacgggccgcagcgtcctcaccgtgcgcaacgcctcgctgtcggcggccgggacccgcgtgtgcgtgggctcctgcgggggccgcaccttccagcacaccgtgcagctccttgtgtacgccttcccggaccagctgaccgtctccccagcagccctggtgcctggtgacccggaggtggcctgtacggcccacaaagtcacgcccgtggaccccaacgcgctctccttctccctgctcgtcgggggccaggaactggagggggcgcaagccctgggcccggaggtgcaggaggaggaggaggagccccagggggacgaggacgtgctgttcagggtgacagagcgctggcggctgccgcccctggggacccctgtcccgcccgccctctactgccaggccacgatgaggctgcctggcttggagctcagccaccgccaggccatccccgtcctgcacagcccgacctccccggagcctcccgacaccacctccccggagcctcccaacaccacctccccggagtctcccgacaccacctccccggagtctcccgacaccacctcccaggagcctcccgacaccacctcccaggagcctcccgacaccacctcccaggagcctcccgacaccacctccccggagcctcccgacaagacctccccggagcccgccccccagcagggctccacacacacccccaggagcccaggctccaccaggactcgccgccctgagatctcccaggctgggcccacgcagggagaagtgatcccaacaggctcgtccaaacctgcgggtgaccagctgcccgcggctctgtggaccagcagtgcggtgctgggactgctgctcctggccttgcccacgtatcacctctggaaacgctgccggcacctggctgaggacgacacccacccaccagcttctctgaggcttctgccccaggtgtcggcctgggctgggttaagggggaccggccaggtcgggatcagcccctcctgagtggccagcctttccccctgtgaaagcaaaatagcttggaccccttcaagttgagaactggtcagggcaaacctgcctcccattctactcaaagtcatccctctgctcacagagatggatgcatgttctgattgcctctttggagaagctcatcagaaactcaaaagaaggccactgtttgtctcacctacccatgacctgaagcccctccctgagtggtccccacctttctggacggaaccacgtactttttacatacattgattcatgtctcacgtctccctaaaaatgcgtaagaccaagctgtgccctgaccaccctgggcccctgtcgtcaggacctcctgaggctttggcaaataaacctcctaaaatgat

SEQ ID NO: 916 - DNA, 2655 bp; single-stranded, linear
  immediate source library: GENBANK
  immediate source clone: g1245045
cggcgtgcgcggacgggcagccagcagcggaggcgcggcgcagcacacccggggaccatgggctccatgttccggagcgaggaggtggccctggtccagctctttctgcccacagcggctgcctacacctgcgtgagtcggctgggcgagctgggcctcgtggagttcagagacctcaacgcctcggtgagcgccttccagagacgctttgtggttgatgtttggcgctgtgaggagctggagaagaccttcaccttcctgcaggaggaggtgcggcgggctgggctggtcctgcccccgccaaaggggaggctgccggcacccccaccccgggacctgctgcgcatccaggaggagacggagcgcctggcccaggagctgcgggatgtgcggggcaaccagcaggccctgcgggcccagctgcaccagctgcagctccacgccgccgtgctacgccagggccatgaacctcagctggcagccgcccacacagatggggcctcagagaggacgcccctgctccaggcccccggggggccgcaccaggacctgagggtcaactttgtggcaggtgccgtggagccccacaaggcccctgccctagagcgcctgctctggagggcctgccgcggcttcctcattgccagcttcagggagctggagcagccgctggagcaccccgtgacgggcgagccagccacgtggatgaccttcctcatctcctactggggtgagcagatcggacagaagatccgcaagatcacggactgcttccactgccacgtcttcccgtttctgcagcaggaggaggcccgcctcggggccctgcagcagctgcaacagcagagccaggagctgcaggaggtcctcggggagacagagcggttcctgagccaggtgctaggccgggtgctgcagctgctgccgccagggcaggtgcaggtccacaagatgaaggccgtgtacctggccctgaaccagtgcagcgtgagcaccacgcacaagtgcctcattgccgaggcctggtgctctgtgcgagacctgcccgccctgcaggaggccctgcgggacagctcgatggaggagggagtgagtgccgtggctcaccgcatcccctgccgggacatgccccccacactcatccgcaccaaccgcttcacggccagcttccagggcatcgtggatcgctacggcgtgggccgctaccaggaggtcaaccccgctccctacaccatcatcaccttccccttcctgtttgctgtgatgttcggggatgtgggccacgggctgctcatgttcctcttcgccctggccatggtccttgcggagaaccgaccggctgtgaaagccgcgcagaacgagatctggcagactttcttcaggggccgctacctgctcctgcttatgggcctgttctccatctacaccggcttcatctacaacgagtgcttcagtcgcgccaccagcatcttcccctcgggctggagtgtggccgccatggccaaccagtctggctggagtgatgcattcctggcccagcacacgatgcttaccctggatcccaacgtcaccggtgtcttcctgggaccctacccctttggcatcgatcctatttggagcctggctgccaaccacttgagcttcctcaactccttcaagatgaagatgtccgtcatcctgggcgtcgtgcacatggcctttggggtggtcctcggagtcttcaaccacgtgcactttggccagaggcaccggctgctgctggagacgctgccggagctcaccttcctgctgggactcttcggttacctcgtgttcctagtcatctacaagtggctgtgtgtctgggctgccagggccgcctcgcccagcatcctcatccacttcatcaacatgttcctcttctcccacagccccagcaacaggctgctctacccccggcaggaggtggtccaggccacgctggtggtcctggccttggccatggtgcccatcctgctgcttggcacacccctgcacctgctgcaccgccaccgccgccgcctgcggaggaggcccgctgaccgacaggaggaaaacaaggccgggttgctggacctgcctgacgcatctgtgaatggctggagctccgatgaggaaaaggcagggggcctggatgatgaagaggaggccgagctcgtcccctccgaggtgctcatgcaccaggccatccacaccatcgagttctgcctgggctgcgtctccaacaccgcctcctacctgcgcctgtgggccctgagcctggcccacgcccagctgtccgaggttctgtgggccatggtgatgcgcataggcctgggcctgggccgggaggtgggcgtggcggctgtggtgctggtccccatctttgccgcctttgccgtgatgaccgtggctatcctgctggtgatggagggactctcagccttcctgcacgccctgcggctgcactgggtggaattccagaacaagttctactcaggcacgggctacaagctgagtcccttcaccttcgctgccacagatgactagggcccactgcaggtcctgccagacctccttcctgacctctgaggcaggagaggaataaagacggtccgccctggcaaaaaaaaaaaaaaaaaaaaaaaaaaaaaaaaa

SEQ ID NO: 917 - DNA, 2520 bp; single-stranded, linear
  immediate source library: GENBANK
  immediate source clone: g1245371
gccgtgttctccttctgcgtgggcgtggcgggccgcgcgcgggtctccgtggaagtccgtttcgtgagcagcgccaagggaaaggggctgtttgccacacagctcatccggaagggggagaccatcttcgtagaacggcccctggtggctgcacagtttctctggaatgcactttatcgctaccgagcctgtgaccactgccttagggcactagagaaggcagaggagaatgcccagaggctgaccgggaaaccaggccaggttctgcctcacccagagctgtgcactgtgcgcaaagacctccaccagaactgtccccattgccaagtgatgtactgcagtgcagaatgtcggttggcagccactgagcaataccaccaggtcctgtgcccaggcccctcccaggatgaccccttgcatcctctcaataagcttcaggaggcatggaggagtattcactacccacctgagactgcaagcatcatgttgatggctaggatggtggccacagtgaagcaggcgaaggacaaggaccgttggatcagactcttttcccagttttgtaacaaaacagccaatgaagaggaggaaattgtccataaacttctgggagacaaattcaagggccaactggaacttctgcggagactcttcacagaggccctctatgaggaagcagtcagccagtggttcactccagatggattccggtctctctttgctcttgttgggaccaatggccaaggaatcgggaccagctccctaagccagtgggtccatgcctgtgacactctggagttgaagcctcaggaccgtgagcacgttgacgccttcattgaccagctatacaaggacatcgaggcagcaactggagagtttcttaactgtgaaggatctggcctctttgtgcttcagagctgctgcaaccacagttgtgtgcccaatgcagagacctcctttccagaaaacaacttccttttgcatgtcactgctctggaggatattaagccaggagaggaaatttgtatcagctacttggactgctgtcagcgggagcgcagccgccacagccgccacaagatcctcagggagaactatctatttgtctgttcctgtcccaaatgcctggcagaggctgatgaacccaatgtgacctcagaagaggaagaggaagaggaggaggaggaggaaggagagccagaagatgcagagctgggggatgagatgactgatgtgtgatgttgccctgcccagaaagggccctgccctagaccctgccagaaaagggggctcttcccccagagaagtggcttggagggaacttcccactcccattgcctgctttccccattccagccctctctgctagagggtaggagagagcctggatctctggccccaacccccaccagacctcatgccctggacactgctgctgagttggctcagactctgcactggcactgagcctttcacaactggcctccccttgaggttcctccactctagggtttgaggggctggaatcagggccagggcctaacagtgtttcttcccctcggccccacggcccatactcaccccttcacctgaggcttctcccctctcaacttgctgttgatttcttttgaggggtaaaagaaagaccgagttcattgaagcagagatgggaggtggtgaggcgtcctcacctccccccaccacagctgtggctggtaaggcaactgcttgaccactggcccagcaagcagaggcgggcaggaggatctgggcatcctgagccccttccctgaggctgtctcctgggaatgctggaccagggggattacttcccccacccacacccccatttggacatctggggaagtggagattaaccctcccccagactcgtgccttgcctctcaggacctggcacagtggctggccttatggagtatggaaaaggcctctgccttcctcaggagggacacatagtgggtcatcaccctttctcacacctgcttcccaatgagcactcagcagcatggctgagacctggggcttgacaggcctgcgctccttagattaggatgctctggtattcctggggccagttaaaatgggtcagtgaggggctctcctggcctcaatctccatctttagggtctccacagactaacattgaagtcttccagaaacctcgaggagctgggctagatacttcgagagtagccctgtcttgtcccctcctacccccagattagcaccacccctctcactcttgggttggatgctatgggaattacaacccatcactcccaatgcctccctttcctggaggagcctgctgcattctcctgctgagggatcccagagagggcaggtgcccaccccacaggccctttcctggaccatggagccaggtgaaacctgtctggccccttacccattgggttcttactccttcacaacggtcagcactcctctcccagcccccctgcccactgttctcaataaaatgtgagtggtgaaaaaaaa

SEQ ID NO: 918 - DNA, 2083 bp; single-stranded, linear
  immediate source library: GENBANK
  immediate source clone: g1255719
agcgttcgctcaactccagaaccttccgacctccgctagttcctgcgggcctttgcccgcttcccggtgcaccctccccgggagacacctcagacccccgacagcctgggcaggctcggtgcctgcgggtgcgttcctgatcacccctcccctcttccctccccctcatcctccattcccttgttttcaccctctgtcctctgcccgtcactccccttgtcacctcttggagccccctcctaaccagcggccagtgggtttcccataccccaggatgtgagcctctttaacctgtaatgctgtggctagcccttggcccctttcctgccatggagaaccaggtgctggtaattcgcatcaagatcccaaatagtggcgcggtggactggacagtgcactccgggccgcagttactcttcagggatgtgctggatgtgataggccaggttctgcctgaagcaacaactacagcatttgaatatgaagatgaagatggtgatcgaattacagtgagaagtgatgaggaaatgaaggcaatgctgtcatattattattccacagtaatggaacagcaagtaaatggacagttaatagagcctctgcagatatttccaagagcctgcaagcctcctggggaacggaacatacatggcctgaaggtgaatactcgggccggaccctctcaacacagcagcccagcagtctcagattcacttccaagcaatagcttaaagaagtcttctgctgaactgaaaaaaatactagccaatggccagatgaatgaacaagacatacgatatcgggacactcttggtcatggcaacggaggcacagtctacaaagcatatcatgtcccgagtgggaaaatattagctgtaaaggtcatactactagatattacactggaacttcagaagcaaattatgtctgaattggaaattctttataagtgcgattcatcatatatcattggattttatggagcattttttgtagaaaacaggatttcaatatgtacagaattcatggatgggggatctttggatgtatataggaaaatgccagaacatgtccttggaagaattgcagtagcagttgttaaaggccttacttatttgtggagtttaaagattttacatagagacgtgaagccctccaatatgctagtaaacacaagaggacaggttaagctgtgtgattttggagttagcactcagctggtgaattctatagccaagacgtatgttggaacaaatgcttatatggcgcctgaaaggatttcaggggagcagtatggaattcattctgatgtctggagcttaggaatctcttttatggagattcagaaaaaccagggatctttaatgcctctccagcttctgcagtgcattgttgatgaggattcgcccgtccttccagttggagagttctcggagccatttgtacatttcatcactcagtgtatgcgaaaacagccaaaagaaaggccagcacctgaagaattgatgggccacccgttcatcgtgcagttcaatgatggaaatgccgccgtggtgtccatgtgggtgtgccgggcgctggaggagaggcggagccagcaggggcccccgtgaggctgccgcagggcactgaaagcccaggaccagtaaccaaggagaacaacccacccgtcgcccttctccgtatgctgcctgcgccagaagagctttgctgggccctggcttccctgccctcgccttcacctctgtcagcaggtggccttgcctggggagccccatgtgtggcccaccccaccaggccatccccataccttctggtttgaaggcgctgacactggcagagaggtaaagggtggggcattgagaatggaggctcccagggtccctgcccacttctgttttcctaatgtttttctctataaagggtcaggcccgtcagcatcactgatgggaataaaagtattaatgctttgtgacagcctctgcctgaaaactggacagaaggacccagaggtgttctttcattttctctcttacctccaatctttcccctttcaagctacaggtaaaggctctaccaccat

SEQ ID NO: 919 - DNA, 839 bp; single-stranded, linear
  immediate source library: GENBANK
  immediate source clone: g1255924
ccatttcaactttaacacagcatgatcgaaacatacaaccaaacttctccccgatctgcggccactggactgcccatcagcatgaaaatttttatgtatttacttactgtttttcttatcacccagatgattgggtcagcactttttgctgtgtatcttcatagaaggttggacaagatagaagatgaaaggaatcttcatgaagattttgtattcatgaaaacgatacagagatgcaacacaggagaaagatccttatccttactgaactgtgaggagattaaaagccagtttgaaggctttgtgaaggatataatgttaaacaaagaggagacgaagaaagaaaacagctttgaaatgcaaaaaggtgatcagaatcctcaaattgcggcacatgtcataagtgaggccagcagtaaaacaacatctgtgttacagtgggctgaaaaaggatactacaccatgagcaacaacttggtaaccctggaaaatgggaaacagctgaccgttaaaagacaaggactctattatatctatgcccaagtcaccttctgttccaatcgggaagcttcgagtcaagctccatttatagccagcctctgcctaaagtcccccggtagattcgagagaatcttactcagagctgcaaatacccacagttccgccaaaccttgcaggcaacaatccattcacttgggaggagtatttgaattgtaaccaggtgcttcggtgtttgtcaatgtgactgatccaagccaagtgagccatggcactggctcacgtcctttggcttactcaaactctgaacagtgtcaccttgcaggctgtggtggagctga

SEQ ID NO: 920 - DNA, 1131 bp; single-stranded, linear
  immediate source library: GENBANK
  immediate source clone: g1256700
acagcgtcttccgcgccgcgcatggagcctcccggccgccgcgagtgtccctttccttcctggcgctttcctgggttgcttctggcggccatggtgttgctgctgtactccttctccgatgcctgtgaggagccaccaacatttgaagctatggagctcattggtaaaccaaaaccctactatgagattggtgaacgagtagattataagtgtaaaaaaggatacttctatatacctcctcttgccacccatactatttgtgatcggaatcatacatggctacctgtctcagatgacgcctgttatagagaaacatgtccatatatacgggatcctttaaatggccaagcagtccctgcaaatgggacttacgagtttggttatcagatgcactttatttgtaatgagggttattacttaattggtgaagaaattctatattgtgaacttaaaggatcagtagcaatttggagcggtaagcccccaatatgtgaaaaggttttgtgtacaccacctccaaaaataaaaaatggaaaacacacctttagtgaagtagaagtatttgagtatcttgatgcagtaacttatagttgtgatcctgcacctggaccagatccattttcacttattggagagagcacgatttattgtggtgacaattcagtgtggagtcgtgctgctccagagtgtaaagtggtcaaatgtcgatttccagtagtcgaaaatggaaaacagatatcaggatttggaaaaaaattttactacaaagcaacagttatgtttgaatgcgataagggtttttacctcgatggcagcgacacaattgtctgtgacagtaacagtacttgggatcccccagttccaaagtgtcttaaaggtcctaggcctacttacaagcctccagtctcaaattatccaggatatcctaaacctgaggaaggaatacttgacagtttggatgtttgggtcattgctgtgattgttattgccataggaaagcagatggtggagctgaatatgccacttaccagactaaatcaaccactccagcagagcagagaggctgaatagattccacaacctggtttgccagttcatcttttgactctattaaaatcttcaatagttgtt

SEQ ID NO: 921 - DNA, 2026 bp; single-stranded, linear
  immediate source library: GENBANK
  immediate source clone: g1261911
tggagttcacacacacatctacatggagatcacacacactctacatggagctcacacatacgcctcaacatggagatcacacaacatcagagatgacacacacaacacagagatcacacaagtcaacatggagatctctctctctctacacacacacacacacacacacacacacacacacacacacactggcacaagcccagcattcatggcgcagccatctcttgtacttgctagcaaaacaccacctgtggaaagtcagctcaaacttccaacctcatccctcacaaagggggaatggagggtttggttttggctttcactggagtctgcaacaagaactggcatcatgctgcccatttcccgcctctccccacccagacccctgcctcagggacgcctgtcctcagcccagccctcagctgcagccaggccttcagcctccgtaacccccgctcagggtccccaccccctgcagccctgtccctccagatgcatggccttgtcctgtgtgggggtggccgagagcactgccccagccctgggtaccttgggcaggaagctggcagaggccagggctgccattcaaacaggggcaggtggttttgccaggaggaagttgacagttcaacttcaaacatgggtgacgcaggccccacactgcctgctccccgtcccacccctccctgagcacgccaccccgccctctccctctctgagagcgagatacccggccagacaccctcacctgcggtgcccagctgcccaggctgaggcaagagaaggccagaaaccatgcccatggggtctctgcaaccgctggccaccttgtacctgctggggatgctgggtgagtacccctcccaggtgtcctgcgaacacccgggctcgctccagtgcaaggaaggagttcccagttttacccaaggctgactctgggatccacatgtcagccctctggagcgttgtggagatttggggccactgggatccctgcctgcccccactaagccgcagcttggccctctgtcctgcatgtcccacccgccaggagcacaaccttgcctctctcatgcgctgttgagaaccctgctttacccttccagtgcaagagagactgcaggggggacccgcatttgatggggcccagacaacttgattcctaggctgagttggattttagcagagcattcaggcctccctctgcgaggtcccccactgacagcccagtctttacttggtcgcctccagagacatggaaactcgccgtctccgaggcagctctgatgatgctctggacagacagcgggccgaggcagggtgggagccgcctctgaggacgatgtctgagcaaatgtcaaggactcatagcggaagtcctagggcctctcatgcccagtcctgggtcaagtcccagaggggcccagccaggccggctgggatgagtacacgctgggcctgctctcactccagccctgggttgtaagcccaaccctgtgtgacctcggataggtccccaagcctctccaggccttgatctccccatttatgaaatgtgggggttgggggtgtgaactggatgaggcctgacccacttcctgaggatttagaaggtctggcagggtgacagaggtgcgtgactctgggctggaaacaggaggatgcgagcagcttccaggctggcagggagagggtcccgaggcctcgcctgcctgagcagggagcctcagcagccttctagggaaaccggtgtgcaggtgtgagtgtgggggaatgcatgtgtgtgtgtctgtgtgcatgtgtgtgagaactgtgtgtgggggaatgtgtgagtctatgtgtgtctgtgtgagtctgtgtgtacgtgtgtgagaactgtgttggggggtaatgtgtgactctgtgtgtgagtctgtgtgtgagtctctggccatgtgtgtgagtactgtgtgtaggggaatgtgtgagtctgtgtgtgagtctgtgtgtgagtctctgggcatgtgtgtgagtactgtctgggggg

SEQ ID NO: 922 - DNA, 600 bp; single-stranded, linear
  immediate source library: GENBANK
  immediate source clone: g1277177
ccgactccagctctgacttttttcgcggctctcggcttccactgcagccatgtcactcctcttgctggtggtctcagcccttcacatcctcattcttatactgcttttcgtggccactttggacaagtcctggtggactctccctgggaaagagtccctgaatctctggtacgactgcacgtggaacaacgacaccaaaacatgggcctgcagtaatgtcagcgagaatggctggctgaaggcggtgcaggtcctcatggtgctctccctcattctctgctgtctctccttcatcctgttcatgttccagctctacaccatgcgacgaggaggtctcttctatgccaccggcctctgccagctttgcaccagcgtggcggtgtttactggcgccttgatctatgccattcacgccgaggagatcctggagaagcacccgcgagggggcagcttcggatactgcttcgccctggcctgggtggccttccccctcgccctggtcagcggcatcatctacatccacctacggaagcgggagtgagcgccgcgcctcgctcggctgcccccgccccttccgggcccccctgccgcgcgtcctcc

SEQ ID NO: 923 - DNA, 3629 bp; single-stranded, linear
  immediate source library: GENBANK
  immediate source clone: g1289370
gaattccggcgtcgcggacgcatcccagtctgggcgggacgctcggccgcggcgaggcgggcaagcctggcagggcagagggagccccggctccgaggttgctcttcgcccccgaggatcagtcttggccccaaagcgcgacgcacaaatccacataacctgaggaccatggatgctgatgagggtcaagacatgtcccaagtttcagggaaggaaagcccccctgtaagcgatactccagatgagggcgatgagcccatgccgatccccgaggacctctccaccacctcgggaggacagcaaagctccaagagtgacagagtcgtggccagtaatgttaaagtagagactcagagtgatgaagagaatgggcgtgcctgtgaaatgaatggggaagaatgtgcggaggatttacgaatgcttgatgcctcgggagagaaaatgaatggctcccacagggaccaaggcagctcggctttgtcgggagttggaggcattcgacttcctaacggaaaactaaagtgtgatatctgtgggatcatttgcatcgggcccaatgtgctcatggttcacaaaagaagccacactggagaacggcccttccagtgcaatcagtgcggggcctcattcacccagaagggcaacctgctccggcacatcaagctgcattccggggagaagcccttcaaatgccacctctgcaactacgcctgccgccggagggacgccctcactggccacctgaggacgcactccgttggtaaacctcacaaatgtggatattgtggccgaagctataaacagcgaagctctttagaggaacataaagagcgctgccacaactacttggaaagcatgggccttccgggcacactgtacccagtcattaaagaagaaactaatcacagtgaaatggcagaagacctgtgcaagataggatcagagagatctctcgtgctggacagactagcaagtaacgtcgccaaacgtaagagctctatgcctcagaaatttcttggggacaagggcctgtccgacacgccctacgacagcagcgccagctacgagaaggagaacgaaatgatgaagtcccacgtgatggaccaagccatcaacaacgccatcaactacctgggggccgagtccctgcgcccgctggtgcagacgcccccgggcggttccgaggtggtcccggtcatcagcccgatgtaccagctgcacaagccgctcgcggagggcaccccgcgctccaaccactcggcccaggacagcgccgtggagaacctgctgctgctctccaaggccaagttggtgccctcggagcgcgaggcgtccccgagcaacagctgtcaagactccacggacaccgagagcaacaacgaggagcagcgcagcggtctcatctacctgaccaaccacatcgccccgcacgcgcgcaacggcttgtcgctcaaggaggagcaccgcgcctacgacctgctgcgcgccgcctccgagaactcgcaggacgcgctccgcgtggtcagcaccagcggggagcagatgaaggtgtacaagtgcgaacactgccgggtgctcttcctggatcacgtcatgtacaccatccacatgggctgccacggcttccgtgatccttttgagtgcaacatgtgcggctaccacagccaggaccggtacgagttctcgtcgcacataacgcgaggggagcaccgcttccacatgagctaaagccctcccgcgcccccaccccagaccccgagccaccccaggaaaagcacaaggactgccgccttctcgctcccgccagcagcatagactggactggaccagacaatgttgtgtttggatttgtaactgttttttgttttttgtttgagttggttgattggggtttgatttgcttttgaaaagatttttatttttagaggcagggctgcattgggagcatccagaactgctaccttcctagatgtttccccagacgctggctgagattccctcacctgtcgcttcctagaatccccttctccaaacgattagtctaaattttcagagagaaatagataaaacacgccacagcctgggaaggagcgtgctctaccctgtgctaagcacggggttcgcgcaccaggtgtctttttccagtccccagaagcagagagcacagcccctgctgtgtgggtctgcaggtgagcagacaggacaggtgtgccgccacccaagtgccaagacacagcagggccaacaacctgtgcccaggccagcttcgagctacatgcatctagggcggagaggctgcacttgtgagagaaaatacttatttcaagtcatattctgcggtaggaaaatgattgggttggggaaagtcggtgtctgtcagactgccctgggtggagggagacgccgggttagagcctttgggatcgtcctggattcactggcttgggggaggctgttcagatggcctgagcctcccgaggcttgctgccccgtaggaggagactgtcttcccgtgggcatatctggggagccctgttccccgctttttcactcccatacctttaatggcccccaaaatctgtcactacaatttaaacaccagtcccgaaatttggatcttctttctttttgaatctctcaaacggcaacattcctcagaaaccaaagctttatttcaaatctcttccttccctggctggttccatctagtaccagaggcctcttttcctgaagaaatccaatcctagccctcattttaattatgtacatctgtttgtagccacaagcctgaatttctcagtgttggtaagtttctttacctaccctcactatatattattctcgttttaaaacccataaaggagtgatttagaacatcattaattttccaactcaatgaaaatatgtgaagcccagcatctctgttgctaacacacagagctcacctgttgaaacccaagctttcaaacatgttgaagctctttactgtaaaggcaagccagcatgtgtgtccacacatacataggatggctggctctgcacctgtaggatattggaatgcacagggcaattgagggnctgagccagaccttcggagagtaatgccaccagatcccctaggaaagaggaggcaaatggcactgcaggtgagaaccccgcccatccgtgctatgacatggaggcactgaagcccgaggaaggtgtgtggagattctaatcccaacaagcaagggtctccttcaagattaatgctatcaatcattaaggtcattactctcaaccacctaggcaatgaagaatataccatttcaaatatttacagtacttgtcttcaccaacactgtcccaaggtgaaatgaagcaacagagaggaaattgtacataagtacctcagcatttaatccaaacaggggttcttagtctcagcactatgacattttgggctgactacttatttgttaggcgggagctctcctgtgcattgtaggataattagcagtatccctggtggctacccaatagacgccagtagcaccccgaattgacaacccaaactctccagacatcaccaactgtcccctgcgaggagaaatcactcctgggggagaaccactgacccaaatgaattc

SEQ ID NO: 924 - DNA, 925 bp; single-stranded, linear
  immediate source library: GENBANK
  immediate source clone: g1296608
ccaggaagcagtgagcccaggagtcctcggccagccctgcctgcccaccaggaggatgaaggtctccgtggctgccctctcctgcctcatgcttgttgctgtccttggatcccaggcccagttcacaaatgatgcagagacagagttaatgatgtcaaagcttccactggaaaatccagtagttctgaacagctttcactttgctgctgactgctgcacctcctacatctcacaaagcatcccgtgttcactcatgaaaagttattttgaaacgagcagcgagtgctccaagccaggtgtcatattcctcaccaagaaggggcggcaagtctgtgccaaacccagtggtccgggagttcaggattgcatgaaaaagctgaagccctactcaatataataataaagagacaaaagaggccagccacccacctccaacacctcctgagcctctgaagctcccaccaggccagctctcctcccacaacagcttcccacagcatgaagatctccgtggctgccattcccttcttcctcctcatcaccatcgccctagggaccaagactgaatcctcctcacggggaccttaccacccctcagagtgctgcttcacctacactacctacaagatcccgcgtcagcggattatggattactatgagaccaacagccagtgctccaagcccggaattgtcttcatcaccaaaaggggccattccgtctgtaccaaccccagtgacaagtgggtccaggactatatcaaggacatgaaggagaactgagtgacccagaaggggtggcgaaggcacagctcagagacataaagagaagatgccaaggccccctcctccacccaccgctaactctcagccccagtcaccctcttggagcttccctgctttgaattaaagaccactcatgctcttc

SEQ ID NO: 925 - DNA, 2380 bp; single-stranded, linear
  immediate source library: GENBANK
  immediate source clone: g1296656
gggccatggggctgggccgggtcctgctgtttctggccgtcgccttcccttttgcacccccggcagccgccgctgagccccacagtcttcgttacaacctcatggtgctgtcccaggatgaatctgtgcagtcagggtttctcgctgagggacatctggatggtcagcccttcctgcgctatgacaggcagaaacgcagggcaaagccccagggacagtgggcagaagatgtcctgggagctaagacctgggacacagagaccgaggacttgacagagaatgggcaagacctcaggaggaccctgactcatatcaaggaccagaaaggaggcttgcattccctccaggagattagggtctgtgagatccatgaagacagcagcaccaggggctcccggcatttctactacgatggggagctcttcctctcccaaaacctggagactcaagaatcgacagtgccccagtcctccagagctcagaccttggctatgaacgtcacaaatttctggaaggaagatgccatgaagaccaagacacactatcgcgctatgcaggcagactgcctgcagaaactacagcgatatctgaaatccggggtggccatcaggagaacagtgccccccatggtgaatgtcacctgcagcgaggtctcagagggcaacatcaccgtgacatgcagggcttccagcttctatccccggaatatcacactgacctggcgtcaggatggggtatctttgagccacaacacccagcagtggggggatgtcctgcctgatgggaatggaacctaccagacctgggtggccaccaggattcgccaaggagaggagcagaggttcacctgctacatggaacacagcgggaatcacggcactcaccctgtgccctctgggaaggtgctggtgcttcagagtcaacggacagactttccatatgtttctgctgctatgccatgttttgttattattattattctctgtgtcccttgttgcaagaagaaaacatcagcggcagagggtccagagcttgtgagcctgcaggtcctggatcaacacccagttgggacaggagaccacagggatgcagcacagctgggatttcagcctctgatgtcagctactgggtccactggttccactgagggcgcctagactctacagccaggcggccaggattcaactccctgcctggatctcaccagcactttccctctgtttcctgacctatgaaacagaaaataacatcacttatttattgttgttggatgctgcaaagtgttagtaggtatgaggtgtttgctgctctgccacgtagagagccagcaaagggatcatgaccaactcaacattccattggaggctatatgatcaaacagcaaattgtttatcatgaatgcaggatgtgggcaaactcacgactgctcctgccaacagaaggtttgctgagggcattcactccatggtgctcattggagttatctactgggtcatctagagcctattgtttgaggaatgcagtcttacaagcctactctggacccagcagctgactccttcttccacccctcttcttgctatctcctataccaataaatacgaagggctgtggaagatcagagcccttgttcacgagaagcaagaagccccctgaccccttgttccaaatatactcttttgtctttctctttattcccacgttcgccctttgttcagtccaatacagggttgtggggcccttaacagtgccatattaattggtatcattatttctgttgtttttgtttttgtttttgtttttgtttttgagacagagtctcactcgtcacccaggctgcagttcactggtgtgatctcagctcactgcaacctctgcctcccaggttcaagcacttctcgtacctcagactcccgatagctgggattacagacaggcaccaccacacccagctaatttttgtattttttgtagagacggggtttcgccaagttgaccagcccagtttcaaactcctgacctcaggtgatctgcctgccttggcatcccaaagtgctgggattacaagaatgagccaccgtgcctggcctattttattatattgtaatatattttattatattagccaccatgcctgtcctattttcttatgttttaatatattttaatatattacatgtgcagtaattagattatcatgggtgaactttatgagtgagtatcttggtgatgactcctcctgaccagcccaggaccagctttcttgtcaccttgaggtcccctcgccccgtcacaccgttatcgattactctgtgtctactattatgtgtgcataatttataccgtaaatgtttactctttaaataaaaaaaaaaaaaaa

SEQ ID NO: 926 - DNA, 5900 bp; single-stranded, linear
  immediate source library: GENBANK
  immediate source clone: g1304113
gctgtcgctgtgtttgctttaacctgagtcttgttccttattgtggttcctgctgtggttttgatcatgttgttaccctcggacgtagcccggcttgtattgggttacttacagcaagaaaacctcatttctacctgccagacttttattttggaaagttcagatttaaaagaatatgcagaacattgtacagatgaagggtttattccagcctgcttactgtccttatttggaaaaaacttgacaacaattttaaatgagtatgtagctatgaaaacaaaagaaacatcaaataatgtcccagcaataatgtcatctctatggaagaaattggaccatacactttctcagatcaggagcatgcaaagttccccaaggtttgctggcagtcagagagcccgaacgagaactggaattgcagaaatcaaacggcagagaaagcttgcatctcaaacagctccagccagtgcagagttgctcactttaccttacctttcaggacagtttaccactcctccttccacaggtacacaggttactcgaccaagtggccaaatttcagatccatcgaggtcatattttgtagtggtcaaccactcacagtcacaagatactgtaaccactggagaagctttaaatgtcattcctggtgctcaggaaaagaaagcacatgccagtttaatgtctcccggtagacgcaaaagtgaatctcagagaaaaagtaccactttgtctggccctcattcaacaatacggaatttccaagatccaaacgcttttgcagtagaaaaacaaatggttattgaaaatgcacgagaaaaaatactaagcaacaaatctcttcaagaaaagctagcagaaaacataaataaatttttaactagtgataacaatattgcccaagtacctaagcaaacagataacaaccctacggagccagagacttcaattgatgaattcctaggacttccgagtgaaattcacatgtctgaagaagctatacaggacatattggaacagacagaatcagacccagcatttcaggcactctttgatctctttgactatggcaaaacaaagaataataaaaatatatcacaaagtatttccagtcaacctatggaatccaatcccagtatagtcttagcagatgaaactaatctagcagttaaaggttcttttgaaacagaagaatctgatggtcagtctggtcagcccgctttttgtacatcctatcagaatgatgacccattaaatgctttgaagaatagcaacaaccatgatgtgcttagacaagaagaccaggaaaatttttcccaaataagtaccagcatacagaaaaaggcctttaaaacagctgtacccactgaacagaagtgtgacattgacattacctttgagtccgtgcctaatttgaatgactttaaccaaagagggaattctaatgctgaatgtaatccacattgtgctgaattatacaccaatcagatgtccactgaaactgaaatggctatagggattgaaaagaactctttgtcttcaaatgtaccgagtgaatctcagttacagcctgatcagcctgatataccaataacttcatttgtttcacttggttgtgaagctaacaatgaaaacttaattctctctgggaagagttctcaacttttatcccaagatacttcattaactggaaagccatctaaaaaaagtcaattttgtgaaaattctaatgatacagtaaaacttaaaattaattttcatggttccaagtcatcagattctagtgaaattcacaagagtaaaatagaaattaatgtgttagaaccagttatgtcacagctatcaaattgccaagataattcttgtcttcaaagtgaaatactacctgtgtctgttgaaagttcacatttaaatgtatctggacaagtagaaattcatcttggagattcgctgtcttctactaaacaaccatctaatgattcagcatctgttgagttaaatcatacagaaaatgaagctcaggcatccaagtctgagaattcacaggagccttcatcttctgtaaaagaagagaatactatttttctctctttaggtggaaatgctaactgtgagaaagttgcactgacgcctccagaaggcactcctgtagaaaacagtcactctcttcctccagaatctgtgtgttcttcagtgggagattctcaccctgagtcccaaaatactgatgataaaccttctagcaacaactcagcagagatagatgcatcaaatatcgtctctctcaaagttatcattagtgatgatccatttgtttcctcagatactgaacttaccagtgctgtttctagtattaatggagaaaacctgccaactataatcttgtcttctcctactaaatcacctactaaaaatgcagaactagttaaatgcctatcttcagaagaaactgtaggtgctgttgtatatgccgaagtaggggattcagcctcaatggaacagagtcttttaacattcaaatctgaagactctgcagtaaacaatactcagaatgaagatggcattgctttttcagctaatgttacaccatgtgtttccaaggatggaggatatatacagttgatgccagccacaagcacagcttttggcaattcaaataacattctgatagctacctgtgtgactgatccaacagcgttaggaacatctgtaagtcagtctaatgtagtggtgttgcctggaaattctgcacctatgactgctcaacctctaccacctcagttacagacaccaccaaggtcaaacagtgtatttgctgtcaaccaagctgtgtcaccaaacttttcacaaggatctgccataataattgcctctccagtccagcctgtactccaaggaatggtagggatgatcccagtatctgtggttggacagaatggaaataacttttctactcctcctcggcaggttcttcatatgcctttgacagcacctgtatgcaatagaagtatccctcaattccccgtccctccaaaatctcagaaggctcagggactaagaaacaagccttgtataggaaaacaagtaaataatttggtggattcgtcaggtcattcagttggatgtcatgcacaaaaaactgaagtttctgacaaaagtattgccacagatcttgggaaaaaatcagaagaaaccacagttcccttcccagaagagagtatagttccagctgctaaaccatgccacagacgtgtactctgtttcgacagcactactgctcctgtggcaaatacgcaggggccaaaccataagatggtgtcccaaaacaaagaaaggaatgcagtctcttttcctaatcttgactcacccaatgtgtcctccaccttaaaacccccttctaataatgctatcaaaagagagaaagagaagcctcctctgcctaagattttatctaaatcggaaagtgccattagccggcataccaccataagagaaactcaatcagaaaagaaagtttcaccaacagaaattgtgcttgaatctttccataaagcaacagctaataaggagaatgaattatgcagcgatgtagaaagacagaaaaatccagaaaattcaaaactatctattgggcagcaaaatgggggtttgcgaagtgagaaatctatagcttcactgcaagaaatgaccaaaaaacaaggcacatcttcaaacaataaaaatgtactttcagtaggtacagctgtgaaggatctaaaacaagaacaaactaaatccgccagttctttgattaccacagaaatgttacaggatatacagaggcacagctcagtaagtaggcttgctgatagtagtgatttacctgtgccccggacacctggctcaggggcaggggaaaaacataaagaagaacctatagatattatcaaggccccctctagtaggcgtttcagtgaagacagtagtacatcaaaagtaatggtccctcctgtcaccccagacttgcctgcctgcagccctgccagtgaaacaggaagtgaaaacagtgtaaatatggctgcccacacattaatgattctctccagggcagccatttctaggactacttcagcaactcctctgaaagataacacacaacagtttagagcatcttcaaggagcaccacaaaaaagcggaaaattgaggaattagatgaacgtgagcgaaactctcgtccttctagtaaaaatcttacaaattcatcaataccaatgaaaaagaagaaaattaagaaaaagaagcttcccagttcatttccagcaggaatggatgtagacaaatttttgttatcattgcattatgatgagtaaacattctggacacataagacagtaggtgttaaaaactcatatcccttaaactgagtgtagggaatgggatattgacagaatctgaaagcatgacctgcactttcattgtactgaaacttcactttatatctaaatcatgctgtttctgaaacagcttcctagtttgtaaatagacttacttggtatatttttattttgggaaaaacgtttgcagaaatgtaagtaaagccaatctgcaaaactgtatagctttgacaattccatattgtaaatactgtgtaaatcttgttgaaatagaggttaaatcaacctaatgttcttacactgtgttttttgacttcttatgatccctaattctcgagacttactcatctggaatagtttctcacttgttttggaggaaaatgatgcttattcttataaattaccttcagtaactattcaataagacatttaaatacacaatcactaagtactacaaaataataaccacctcaactgatagcaaaatatctaattagaaatcaacagtttgatgagtttttttcctagagtgaattactacccctttcttataattgctgtaagtattatatttctggaatttcacactttacctactctgatcactctgttctctttgttttaaagagagaattttgtaaaccatttattgaatgttctgatctttcatttataacttaagattttttaacagaactttaagtggttagactattgagccataaaattttggtttgtagtagagatttctcggtatgtacttttcccctaaatgctggggatttaaagaattgcactaattcatagaactctttacattgtagtgaccaatgcacatataatttaaatcttgtgttctatgtgagagtttatgtggaggattatcttctggtgttgtgtccatcataagatgtaaaaagagaaatcatagttttatattttagtttctcctacaatgggtatgttaaataactatatctatacttagatatagtgcattgtctgtgtcccttaaagtgttacaaagagtttctctcaaaaggtccttaaggagagtgagagatgagagaggtgccttctctgtattagactcacacacatcagtccagttgaagaattggtttaaacttttaaatgagacagaaattataattagtacctgaccaattgtgcctagatattaaagtatgttctctttagtactttccgttcaattaaatatcagtatattagggatttttttctacaggtgtatattttgttgaagagtcactttcctcaaccatttttttgtactgggcctttaaaaaaataaatccatccaactttaacacaacatttctcagtgtagaaatcatgtcttcttaattgctgaaccttactgcaaaaacttgtgatgtaagaaatttgtatggtgtggcagtggtctattcctaaggaactaaatatcatatagttaatgtttatttaactcagcttgagactgtactacagttaggtttgaataaatattttcattaacttca

SEQ ID NO: 927 - DNA, 1236 bp; single-stranded, linear
  immediate source library: GENBANK
  immediate source clone: g1311467
agcaatgaacttcatcaagttccatcgaactgtgactgtctaaatggaggaacatgtgtgtccaacaagtacttctccaacattcactggtgcaactgcccaaagaaattcggagggcagcactgtgaaatagataagtcaaaaacctgctatgaggggaatggtcacttttaccgaggaaaggccagcactgacaccatgggccggccctgcctgccctggaactctgccactgtccttcagcaaacgtaccatgcccacagatctgatgctcttcagctgggcctggggaaacataattactgcaggaacccagacaaccggaggcgaccctggtgctatgtgcaggtgggcctaaagctgcttgtccaagagtgcatggtgcatgactgcgcagatggaaaaaagccctcctctcctccagaagaattaaaatttcagtgtggccaaaagactctgaggccccgctttaagattattgggggagaattcaccaccatcgagaaccagccctggtttgcggccatctacaggaggcaccgggggggctctgtcacctacgtgtgtggaggcagcctcatcagcccttgctgggtgatcagcgccacacactgcttcattgattacccaaagaaggaggactacatcgtctacctgggtcgctcaaggcttaactccaacacgcaaggggagatgaagtttgaggtggaaaacctcatcctacacaaggactacagcgctgacacgcttgctcaccacaacgacattgccttgctgaagatccgttccaaggagggcaggtgtgcgcagccatcccggactatacagaccatctgcctgccctcgatgtataacgatccccagtttggcacaagctgtgagatcactggctttggaaaagagaattctaccgactatctctatccggagcagctgaaaatgactgttgtgaagctgatttcccaccgggagtgtcagcagccccactactacggctctgaagtcaccaccaaaatgctgtgtgctgctgacccacagtggaaaacagattcctgccagggagactcagggggacccctcgtctgttccctccaaggccgcatgactttgactggaattgtgagctggggccgtggatgtgccctgaaggacaagccaggcgtctacacgagagtctcacacttcttaccctggatccgcagtcacaccaaggaagagaatggcctggccctctga

SEQ ID NO: 928 - DNA, 2714 bp; single-stranded, linear
  immediate source library: GENBANK
  immediate source clone: g1311504
aacagtagctgtggccattcacacaaacacacagacacaagcgcgcacacaggctccgcacacacacttcgctctcccgcgcgctcacacccctcttgccctgagcccttgccggtgcagcgcggcgccgcagctggacgcccctcccgggctcactttgcaacgctgacggtgccggcagtggccgtggaggtgggaacagcggcggcatcctcccccctggtcacagcccaagccaggacgcccgcggaacctctcggctgtgctctcccatgagtcgggatcgcagcatcccccaccagccgctcaccgcctccgggagccgctgggcttgtacaccgcagcccttccgggacagcagctgcgactcccccccagtgcagatttcgggacagctctctagaaactcgctctaaagacggaaccgccacagcactcaaagcccactgcggaagagggcagcccggcaagcccgggccctgagcctggacccttagcggtgccgggcagcactgccggcgcttcgcctcgccggacgtccgctcctcctacactctcagcctccgctggagagacccccagccccaccattcagcgcgcaagataccctccagatatgccctgcgtccaagcccaatatagcccttcccctccaggttccagttatgcggcgcagacatacagctcggaatacaccacggagatcatgaaccccgactacaccaagctgaccatggaccttggcagcactgagatcacggctacagccaccacgtccctgcccagcatcagtaccttcgtggagggctactcgagcaactacgaactcaagccttcctgcgtgtaccaaatgcagcggcccttgatcaaagtggaggaggggcgggcgcccagctaccatcaccatcaccaccaccaccaccaccaccaccaccatcaccagcagcagcatcagcagccatccattcctccagcctccagcccggaggacgaggtgctgcccagcacctccatgtacttcaagcagtccccaccgtccacccccaccacgccggccttccccccgcaggcgggggcgttatgggacgaggcactgccctcggcgcccggctgcatcgcacccggcccgctgctggacccgccgatgaaggcggtccccacggtggccggcgcgcgcttcccgctcttccacttcaagccctcgccgccgcatccccccgcgcccagcccggccggcggccaccacctcggctacgacccgacggccgctgccgcgctcagcctgccgctgggagccgcagccgccgcgggcagccaggccgccgcgcttgagagccacccgtacgggctgccgctggccaagagggcggccccgctggccttcccgcctctcggcctcacgccctcccctaccgcgtccagcctgctgggcgagagtcccagcctgccgtcgccgcccagcaggagctcgtcgtctggcgagggcacgtgtgccgtgtgcggggacaacgccgcctgccagcactacggcgtgcgaacctgcgagggctgcaagggctttttcaagagaacagtgcagaaaaatgcaaaatatgtttgcctggcaaataaaaactgcccagtagacaagagacgtcgaaaccgatgtcagtactgtcgatttcagaagtgtctcagtgttggaatggtaaaagaagttgtccgtacagatagtctgaaagggaggagaggtcgtctgccttccaaaccaaagagcccattacaacaggaaccttctcagccctctccaccttctcctccaatctgcatgatgaatgcccttgtccgagctttaacagactcaacacccagagatcttgattattccagatactgtcccactgaccaggctgctgcaggcacagatgctgagcatgtgcaacaattctacaacctcctgacagcctccattgatgtatccagaagctgggcagaaaagattccgggatttactgatctccccaaagaagatcagacattacttattgaatcagcctttttggagctgtttgtcctcagactttccatcaggtcaaacactgctgaagataagtttgtgttctgcaatggacttgtcctgcatcgacttcagtgccttcgtggatttggggagtggctcgactctattaaagacttttccttaaatttgcagagcctgaaccttgatatccaagccttagcctgcctgtcagcactgagcatgatcacagaaagacatgggttaaaagaaccaaagagagtcgaagagctatgcaacaagatcacaagcagtttaaaagaccaccagagtaagggacaggctctggagcccaccgagtccaaggtcctgggtgccctggtagaactgaggaagatctgcaccctgggcctccagcgcatcttctacctgaagctggaagacttggtgtctccaccttccatcattgacaagctcttcctggacaccctacctttctaatcaggagcagtggagcagtgagctgcctcctctcctagcacctgcttgctacgcagcaaagggataggtttggaaacctatcatttcctgtccttccttaagaggaaaagcagctcctgtagaaagcaaagactttcttttttttctggctcttttccttacaacctaaagccagaaaacttgcagagtattgtgttggggttgtgttttatattta

SEQ ID NO: 929 - DNA, 2725 bp; single-stranded, linear
  immediate source library: GENBANK
  immediate source clone: g1322221
agtaagcactctcccttgtcgtggaggtgggcaaatctttatcagccactgccttctgctgccaggaagccagctagagtggtctttaaagaaaactgggcatctcctgctacttaaaatcaaaaactacctaaaataaagattatagagccagaggaagagatagccatggaggacagccccactatggttagagtggacagccccactatggttaggggtgaaaaccaggtttcgccatgtcaagggagaaggtgcttccccaaagctcttggctatgtcaccggtgacatgaaagaacttgccaaccagcttaaagacaaacccgtggtgctccagttcattgactggattctccggggcatatcccaagtggtgttcgtcaacaaccccgtcagtggaatcctgattctggtaggacttcttgttcagaacccctggtgggctctcactggctggctgggaacagtggtctccactctgatggccctcttgctcagccaggacaggtcattaatagcatctgggctctatggctacaatgccaccctggtgggagtactcatggctgtcttttcggacaagggagactatttctggtggctgttactccctgtatgtgctatgtccatgacttgcccaattttctcaagtgcattgaattccatgctcagcaaatgggacctccccgtcttcaccctccctttcaacatggcgttgtcaatgtacctttcagccacaggacattacaatccgttctttccagccaaactggtcatacctataactacagctccaaatatctcctggtctgacctcagtgccctggagttgttgaaatctataccagtgggagttggtcagatctatggctgtgataatccatggacagggggcattttcctgggagccatcctactctcctccccactcatgtgcctgcatgctgccataggatcattgctgggcatagcagcgggactcagtctttcagccccatttgagaacatctactttggactctggggtttcaacagctctctggcctgcattgcaatgggaggaatgttcatggcgctcacctggcaaacccacctcctggctcttggctgtgccctgttcacggcctatcttggagtcggcatggcaaactttatggctgaggttggattgccagcttgtacctggcccttctgtttggccacgctattgttcctcatcatgaccacaaaaaattccaacatctacaagatgcccctcagtaaagttacttatcctgaagaaaaccgcatcttctacctgcaagccaagaaaagaatggtggaaagccctttgtgagaacaagccccatttgcagccatggtcacgagtcatttctgcctgactgctccagctaacttccagggtctcagcaaactgctgtttttcacgagtatcaactttcatactgacgcgtctgtaatctgttcttatgctcattttgtattttcctttcaactccaggaatatccttgagcatatgagagtcacatccaggtgatgtgctctggtatggaatttgaaaccccaatggggccttggcactaagactggaatgtatataaagtcaaagtgctccaacagaaggaggaagtgaaaacaaactattagtatttattgatattcttggtgtttagctggctcgatgatgttaacagtattaaaaattaaacccccataaacccaacctaagcctatggaatccacagtcacaaaatcgaagttaacccagaatctgtgataagcagcttggctttttttttaaatcaatgcaagtacaccattatagccagaatctgtatcacagaggtgcaagctgacagcagagctcagtccccacttcctgcaaacaatggcctgcaccctatcccttgtgtgtgtgacattctctcatgggacaatgttggggtttttcagactgacaggactgcaagagggagaaaggaattttgtcaatcaaaattattctgtattgcaacttttctcagagattgcaaaggattttttaggtagagattatttttccttatgaaaaatgatctgttttaaatgagataaaataggagaagttcctggcttaacctgttcttacatattaaagaaaagttacttactgtatttatgaaatactcagcttaggcatttttactttaacccctaaattgattttgtaaatgccacaaatgcatagaattgttaccaacctccaaagggctctttaaaatcatatttttttattcatttgaggatgtcttataaagactgaaggcaaaggtcagaatgcttacgggtgttatttttataagttgttgaattccttaatttagaaaagctcattattttttgcacactcacaatattctctctcagaaatcaatggcatttgaaccaccaaaaagaaataaagggctgagtgtggtgctcacgcctgtaatcccagcactttggggagcccaggcgggcagattgcttgaacccaggagttcaagaccagcctgggcagcatggtgaaaccctgtatctacaaaaaatacaaaaattagccaggcatggtggtgggtgcctgtagttccagctacttgggaggctgaggtgggaaaatgacttgagcccaggaggaggaggctgcagtgagctaagattgcaccactgcactccaacctgggtgacaagagtgaaactgaat

SEQ ID NO: 930 - DNA, 2986 bp; single-stranded, linear
  immediate source library: GENBANK
  immediate source clone: g1353773
agcaggaagctcgcgccgccgtcgccgccgccgctcagcttccccgggcgcgtccaggacccgctgcgccaggcgcgccgtccccggacccggcgtgcgtccctacgaggaaagggaccccgccgctcgagccgcctccgccagccccactgcgaggggtcccagagccagccgcgcccgccctcgcccccggccccgcagccttcccgccctgcgcgccatgaacgcccccgagcggcagccccaacccgacggcggggacgccccaggccacgagcctgggggcagcccccaagacgagcttgacttctccatcctcttcgactatgagtatttgaatccgaacgaagaagagccgaatgcacataaggtcgccagcccaccctccggacccgcataccccgatgatgtaatggactatggcctcaagccatacagcccccttgctagtctctctggcgagccccccggccgattcggagagccggatagggtagggccgcagaagtttctgagcgcggccaagccagcaggggcctcgggcctgagccctcggatcgagatcactccgtcccacgaactgatccaggcagtggggcccctccgcatgagagacgcgggcctcctggtggagcagcctcccctggccggggtggccgccagcccgaggttcaccctgcccgtgcccggcttcgagggctaccgcgagccgctttgcttgagccccgctagcagcggctcctctgccagcttcatttctgacaccttctccccctacacctcgccctgcgtctcgcccaataacggcgggcccgacgacctgtgtccgcagtttcaaaacatccctgctcattattcccccagaacctcgccaataatgtcacctcgaaccagcctcgccgaggacagctgcctgggccgccactcgcccgtgccccgtccggcctcccgctcctcatcgcctggtgccaagcggaggcattcgtgcgccgaggccttggttgccctgccgcccggagcctcaccccagcgctcccggagcccctcgccgcagccctcatctcacgtggcaccccaggaccacggctccccggctgggtacccccctgtggctggctctgccgtgatcatggatgccctgaacagcctcgccacggactcgccttgtgggatcccccccaagatgtggaagaccagccctgacccctcgccggtgtctgccgccccatccaaggccggcctgcctcgccacatctacccggccgtggagttcctggggccctgcgagcagggcgagaggagaaactcggctccagaatccatcctgctggttccgcccacttggcccaagccgctggtgcctgccattcccatctgcagcatcccagtgactgcatccctccctccacttgagtggccgctgtccagtcagtcaggctcttacgagctgcggatcgaggtgcagcccaagccacatcaccgggcccactatgagacagaaggcagccgaggggctgtcaaagctccaactggaggccaccctgtggttcagctccatggctacatggaaaacaagcctctgggacttcagatcttcattgggacagctgatgagcggatccttaagccgcacgccttctaccaggtgcaccgaatcacggggaaaactgtcaccaccaccagctatgagaagatagtgggcaacaccaaagtcctggagatccccttggagcccaaaaacaacatgagggcaaccatcgactgtgcggggatcttgaagcttagaaacgccgacattgagctgcggaaaggcgagacggacattggaagaaagaacacgcgggtgagactggttttccgagttcacatcccagagtccagtggcagaatcgtctctttacagactgcatctaaccccatcgagtgctcccagcgatctgctcacgagctgcccatggttgaaagacaagacacagacagctgcctggtctatggcggccagcaaatgatcctcacggggcagaactttacatccgagtccaaagttgtgtttactgagaagaccacagatggacagcaaatttgggagatggaagccacggtggataaggacaagagccagcccaacatgctttttgttgagatccctgaatatcggaacaagcatatccgcacacctgtaaaagtgaacttctacgtcatcaatgggaagagaaaacgaagtcagcctcagcactttacctaccacccagtcccagccatcaagacggagcccacggatgaatatgaccccactctgatctgcagccccacccatggaggcctggggagccagccttactacccccagcacccgatggtggccgagtccccctcctgcctcgtggccaccatggctccctgccagcagttccgcacggggctctcatcccctgacgcccgctaccagcaacagaacccagcggccgtactctaccagcggagcaagagcctgagccccagcctgctgggctatcagcagccggccctcatggccgccccgctgtcccttgcggacgctcaccgctctgtgctggtgcacgccggctcccagggccagagctcagccctgctccacccctctccgaccaaccagcaggcctcgcctgtgatccactactcacccaccaaccagcagctgcgctgcggaagccaccaggagttccagcacatcatgtactgcgagaatttcgcaccaggcaccaccagacctggcccgcccccggtcagtcaaggtcagaggctgagcccgggttcctaccccacagtcattcagcagcagaatgccacgagccaaagagccgccaaaaacggacccccggtcagtgaccaaaaggaagtattacctgcgggggtgaccattaaacaggagcagaacttggaccagacctacttggatgatgagctgatagacacacaccttagctggatacaaaacatattatga

SEQ ID NO: 931 - DNA, 874 bp; single-stranded, linear
  immediate source library: GENBANK
  immediate source clone: g1354384
ctgagcccagctgctggagccccgagcagcggcatggagtccgtggccctgtacagctttcaggctacagagagcgacgagctggccttcaacaagggagacacactcaagatcctgaacatggaggatgaccagaactggtacaaggccgagctccggggtgtcgagggatttattcccaagaactacatccgcgtcaagccccatccgtggtactcgggcaggatttcccggcagctggccgaagagattctgatgaagcggaaccatctgggagccttcctgatccgggagagtgagagctccccaggggagttctctgtgtctgtgaactatggagaccaggtgcagcacttcaaggtgctgcgtgaggcctcggggaagtacttcctgtgggaggagaagttcaactccctcaacgagctggtcgacttctaccgcaccaccaccatcgccaagaagcggcagatcttcctgcgcgacgaggagcccttgctcaagtcacctggggcctgctttgcccaggcccagtttgacttctcagcccaggacccctcgcagctcagcttccgccgtggcgacatcattgaggtcctggagcgcccagacccccactggtggcggggccggtcctgcgggcgcgttggcttcttcccacggagttacgtgcagcccgtgcacctgtgagcagcccggcggcgatcttgccaacggggctttttacaggaactgaggtccagagaggacatggacacccccagctctgtcagagtcacacggggctcagtggacggccttggactgaacgtaggctcctaactgcctcccggccggtctgcacaaactgggatgggccaggtcccccagcaagggt

SEQ ID NO: 932 - DNA, 2376 bp; single-stranded, linear
  immediate source library: GENBANK
  immediate source clone: g1369836
cggatgagggtcagggctgcgcggacccctatcccgcctgcgtcctcccggcaagcccagcgggagcgcccgctcggctgggtccccgcctccagcgcgccggggccgcccagaccctgggctcagcctcgcgccccggtgcccacctgaggaggcggcggtcccggcctcgcgtcccggatgggacggcgcgggagcaatgccagtggccccgagcgccccgggccacgcgcggggccggccagccgctctcgcgccctccccgccccctccgcgccttgcctcgccgcccgcgcgccccacccaccggccgctcctcccctctccccaccctcctcctccgccccctcccctcccccgccgcctcgcagatagctcggccgcgcgtctcagccgccggggccccgagcgcaggcggcgaggccaccacacctgcagagcgctcgggctgcctaggcggcacctcgcctcccgccgcgcaaaccccttctccccacgcgccgagtctcccatgacgcccgagccccccggccggcgacaatgaccacttccctgcaagatgggcagagcgccgcgagcagggcggctgcccgggattcgccgctggccgcccaggtgtgtggcgctgcccaggggaggggcgacgcccacgacctggcgccggccccctggctgcacgcgcgagcgctcctgccccttccggacgggacccgcggctgtgctgcagacaggagaaaaaagaaagatcttgatgttccggaaatgccatctattccaaacccttttcctgagctatgctgttctccaattacatctgtgttgtcagcagacctatttcccaaagcaaattcaaggaaaaaacaggtgattaaagtatacagtgaagatgaaaccagcagggctttagatgtacccagtgacataacggctcgagatgtttgtcagctgttgatcctgaagaatcattacattgatgaccacagctggaccctttttgagcacctgcctcacataggtgtagaaagaacaatagaagaccacgaactggtgattgaagtgctatccaactgggggatagaagaagaaaacaaactatactttagaaaaaattatgccaaatatgagttctttaaaaacccaatgtatttttttccagagcatatggtatcttttgcaactgaaaccaatggtgaaatatcccccacacagattttgcagatgtttctgagttcaagcacatatcctgaaattcatggtttcttacatgcgaaagaacagggaaagaagtcttggaaaaaaatttacttttttctaagaagatctggtttatatttttctactaaaggaacatcaaaggaaccgcggcatttgcagtttttcagcgaatttggcaatagtgatatttatgtgtcactggcaggcaaaaaaaaacatggagcaccgactaactatggattctgctttaagcctaacaaagcgggagggccccgagacctgaaaatgctctgtgcagaagaagagcagagtaggacgtgctgggtgaccgcgattagattgcttaagtatggcatgcagctgtaccagaattatatgcatccatatcaaggtagaagtggctgcagttcacagagcatatcacctatgagaagtatatcagagaattccctggtagcaatggacttctcaggccagaaaagcagagttatagaaaatcccactgaagccctttcagttgcggttgaagaaggactcgcttggaggaaaaaaggatgtttacgcctgggcactcacggtagccccactgcctcttcacagagctctgccacaaacatggctatccaccggtcccagccatggtttcaccacaaaatttctagagatgaggctcagcgattgattattcagcaaggacttgtggatggagttttcttggtacgggatagtcagagtaaccccaaaactttcgtactgtcaatgagtcatggacaaaaaataaagcactttcaaattataccagtagaagatgacggtgaaatgttccacacactggatgatggccacacaagatttacagatctaatacagctggtggagttctatcaactcaataagggcgttcttccttgcaagttgaaacattattgtgctaggattgctctctagacaagccagaagtgacttattaaactattgaaggaaaaggactcaagaaaaataataaaagaccataaataagggcgaaaacattatcatgtgaaaagaatgtatttcacctgcaagttacaaaaaaatagtttgtgcattgcaaataagcaaagacttggattgactttacattcatcatttaaaattcattagttaaaattaaaccttagg

SEQ ID NO: 933 - DNA, 1677 bp; single-stranded, linear
  immediate source library: GENBANK
  immediate source clone: g1370103
cgggggttttgatcttcttccccttcttttcttccccttcttctttccttcctccctccctctctcatttcccttctccttctccctcagtctccacattcaacattgacaagtccattcagaaaagcaagctgcttctggttgggcccagacctgccttgaggagcctgtagagttaaaaaatgaaccccacggatatagcagataccaccctcgatgaaagcatatacagcaattactatctgtatgaaagtatccccaagccttgcaccaaagaaggcatcaaggcatttggggagctcttcctgcccccactgtattccttggtttttgtatttggtctgcttggaaattctgtggtggttctggtcctgttcaaatacaagcggctcaggtccatgactgatgtgtacctgctcaaccttgccatctcggatctgctcttcgtgttttccctccctttttggggctactatgcagcagaccagtgggtttttgggctaggtctgtgcaagatgatttcctggatgtacttggtgggcttttacagtggcatattctttgtcatgctcatgagcattgatagatacctggcgatagtgcacgcggtgttttccttgagggcaaggaccttgacttatggggtcatcaccagtttggctacatggtcagtggctgtgttcgcctcccttcctggctttctgttcagcacttgttatactgagcgcaaccatacctactgcaaaaccaagtactctctcaactccacgacgtggaaggttctcagctccctggaaatcaacattctcggattggtgatccccttagggatcatgctgttttgctactccatgatcatcaggaccttgcagcattgtaaaaatgagaagaagaacaaggcggtgaagatgatctttgccgtggtggtcctcttccttgggttctggacaccttacaacatagtgctcttcctagagaccctggtggagctagaagtccttcaggactgcacctttgaaagatacttggactatgccatccaggccacagaaactctggcttttgttcactgctgccttaatcccatcatctacttttttctgggggagaaatttcgcaagtacatcctacagctcttcaaaacctgcaggggcctttttgtgctctgccaatactgtgggctcctccaaatttactctgctgacacccccagctcatcttacacgcagtccaccatggatcatgatcttcatgatgctctgtaggaaaaatgaaatggtgaaatgcagagtcaatgaacttttccacattcagagcttactttaaaattggtatttttaggtaagagatccctgagccagtgtcaggaggaaggcttacacccacagtggaaagacagcttctcatcctgcaggcagctttttctctcccactagacaagtccagcctggcaagggttcacctgggctgaggcatccttcctcacaccaggcttgcctgcaggcatgagtcagtctgatgagaactctgagcagtgcttgaatgaagttgtaggtaatattgcaaggcaaagactattcccttctaacctgaactgatgggtttctccagagggaattgcagagtactggctgatggagtaaatcgctaccttttgctgtggcaaatgggcccccg

SEQ ID NO: 934 - DNA, 1559 bp; single-stranded, linear
  immediate source library: GENBANK
  immediate source clone: g1375484
aaggaaagatggtggactacagcgtgtgggaccacattgaggtgtctgatgatgaagacgagacgcaccccaacatcgacacggccagtctcttccgctggcggcatcaggcccgggtggaacgcatggagcagttccagaaggagaaggaggaactggacaggggctgccgcgagtgcaagcgcaaggtggccgagtgccagaggaaactgaaggagctggaggtggccgagggcggcaaggcagagctggagcgcctgcaggccgaggcacagcagctgcgcaaggaggagcggagctgggagcagaagctggaggagatgcgcaagaaggagaagagcatgccctggaacgtggacacgctcagcaaagacggcttcagcaagagcatggtaaataccaagcccgagaagacggaggaggactcagaggaggtgagggagcagaaacacaagaccttcgtggaaaaatacgagaaacagatcaagcactttggcatgcttcgccgctgggatgacagccaaaagtacctgtcagacaacgtccacctggtgtgcgaggagacagccaattacctggtcatttggtgcattgacctagaggtggaggagaaatgtgcactcatggagcaggtggcccaccagacaatcgtcatgcaatttatcctggagctggccaagagcctaaaggtggacccccgggcctgcttccggcagttcttcactaagattaagacagccgatcgccagtacatggagggcttcaacgacgagctggaagccttcaaggagcgtgtgcggggccgtgccaagctgcgcatcgagaaggccatgaaggagtacgaggaggaggagcgcaagaagcggctcggccccggcggcctggaccccgtcgaggtctacgagtccctccctgaggaactccagaagtgcttcgatgtgaaggacgtgcagatgctgcaggacgccatcagcaagatggaccccaccgacgcaaagtaccacatgcagcgctgcattgactctggcctctgggtccccaactctaaggccagcgaggccaaggagggagaggaggcaggtcctggggacccattactggaagctgttcccaagacgggcgatgagaaggatgtcagtgtgtgacctgccccagctaccaccgccacctgcttccagcccctatgtgccccttttcagaaaacagatagatgccatctcgcccgctcctgacttcctctacttgcgctgctcggcccagcctgggggcccgcccagccctccctggcctctccactgtctccactctccagcgcccattcaagtctctgctttgagtcaaggggcttcactgcctgcagccccccatcagcattatgccaaaggccgggggtccggaagggcagaggtcaccaggctggtctaccaggtagttggggagggtccccagccaaggggccggctctcgtcactgggctctgttttcactgttcgtctgctgtctgtgtcttctatttggcaaacagcaatgatcttccaataaaagatttcagatgctca

SEQ ID NO: 935 - DNA, 2511 bp; single-stranded, linear
  immediate source library: GENBANK
  immediate source clone: g1381141
gaagatcctttctgagctgctgtgaataaatttggaatggtactgtatatttccatctaatggagaactagctgtactttgaataaggattgctgcactggacgactttagaacatccctcacaatgtcgtcaacccggagccagaacccccacggcctgaagcagattggcctggaccagatctgggacgacctcagagccggcatccagcaggtgtacacacggcagagcatggccaagtccagatatatggagctctacactcatgtttataactactgtactagtgttcaccagtttgttggcctggaattatataaacgacttaaggaatttttgaagaattacttgacaaatcttcttaaggatggagaagatttgatggatgagagtgtactgaaattctacactcaacaatgggaagattatcgattttcaagcaaagtgctgaatggaatttgtgcctacctcaatagacattgggttcgccgtgaatgtgacgaaggacgaaaaggaatatatgaaatctattcgcttgcattggtgacttggagagactgtctgttcaggccactgaataaacaggtaacaaatgctgttttaaagctgattgaaaaggaaaggaatggtgaaaccatcaatacaagattgattagtggagttgtacagtcttacgtggaattggggctgaatgaagatgatgcatttgcaaagggccctacgttaacagtgtataaagaatcctttgaatctcaatttttggctgacacagagagattttataccagagagagtactgaattcttgcagcagaacccagttactgaatatatgaaaaaggcagaggctcgtctgcttgaggaacaacgaagagttcaggtttaccttcatgaaagcacacaagatgaattagcaaggaaatgtgaacaagtcctcattgaaaaacacttggaaattttccacacagaatttcagaatttattggatgctgacaaaaatgaagatttgggacgcatgtataatcttgtatctagaatccaggatggcctaggagaattgaaaaaactgttggagacacacattcataatcagggtcttgcagccattgaaaagtgtggagaagctgctttaaatgaccccaaaatgtatgtacagacagtgcttgatgttcataaaaaatacaatgccctggtaatgtctgcattcaacaatgacgctggctttgtggctgctcttgataaggcttgtggtcgcttcataaacaacaacgcggttaccaagatggcccaatcatccagtaaatcccctgagttgctggctcgatactgtgactccttgttgaagaaaagttccaagaacccagaggaggcagaactagaagacacactcaatcaagtgatggttgtcttcaagtacatagaagacaaagacgtatttcagaagttctatgcgaagatgctcgccaagaggctcgtccaccagaacagtgcaagtgacgatgccgaagccagcatgatctccaagttaaagcaagcttgcgggttcgagtacacctctaaacttcagcgcatgtttcaagacattggcgtgagcaaagatctgaacgagcaattcaaaaagcacttgacaaactcagaacccctagacttggatttcagcattcaagtgctgagctccgggtcctggcccttccagcagtcttgtacatttgccttgccgtcagagttggaacgtagttatcagcgattcacagctttctacgccagccgccacagtggccgaaaattgacgtggttatatcagttgtctaaaggagaattggtaactaactgcttcaaaaacagatatactttgcaggcgtcgacattccagatggctatcctgcttcagtacaacacggaagatgcctacactgtgcagcagctgaccgacagcactcaaattaaaatggacattttggcgcaagttttacagattttattaaagtcgaagctattggtcttggaagatgaaaatgcaaatgttgatgaggtggaattgaagccagataccttaataaaattatatcttggttataaaaataagaaattaagggttaacatcaatgtgccaatgaaaaccgaacagaagcaggaacaagaaaccacacacaaaaacatcgaggaagaccgcaaactactgattcaggcggccatcgtgagaatcatgaagatgaggaaggttctgaaacaccagcagttacttggcgaggtcctcactcagctgtcctccaggttcaaacctcgagtccctgtgatcaagaaatgcattgacattctaattgagaaagaatatttggagcgagtggatggtgaaaaggacacctacagttacttggcttaacccttctggaagggtctgactgtgtgacccgcagcaaatagttcatgttggaaagaatgaaaacaacttcaagttcataggcagccagcctgccgccattggacctcccttttaaaaactgaggacca

SEQ ID NO: 936 - DNA, 2092 bp; single-stranded, linear
  immediate source library: GENBANK
  immediate source clone: g1381145
attttaggtctcgaaggaagatcagtctatgaagaagattttgaggctccttttttggaaatgtctgcagaattttttcagatggaaagccagaaatttttagcagaaaatagtgcttcagtatatataaagaaagtagaagctagaattaatgaagaaatagaacgagtgatgcactgccttgacaaatcaacggaagaaccaattgtaaaggtggttgaaagggaactcatttccaagcacatgaagactatagtagaaatggagaattctgggctagtacatatgttgaaaaatggaaagacagaagaccttggttgcatgtacaagttatttagtcgtgtgccaaatggtttgaaaacaatgtgtgagtgtatgagttcctatttgagggagcaaggtaaagctcttgtttctgaagaaggagaaggaaagaatcctgttgactatatccagggcttattggatctgaagagtaggttcgatcgcttcctcctggaatcattcaacaatgaccgtctctttaaacaaactattgcgggtgactttgagtattttctcaacctcaactccaggtctcctgaatacctctcattatttattgatgataagctgaaaaagggagtcaaagggctaacagaacaagaagtagaaacaatattggataaagcaatggtcctttttaggtttatgcaagaaaaagatgtatttgaacgttattataaacaacacttggcaaggagacttctcacaaataaaagtgtttctgatgactctgaaaaaaacatgatatctaagttaaagactgaatgtggatgtcagttcacgtcaaaactggaaggaatgtttagggatatgagcatctcaaacacaacgatggatgaattcaggcaacatctacaggcaactggtgtatctttaggtggtgttgatcttacagtccgggtgctcacgacaggatattggcccactcagtcagccacaccaaagtgcaacatcccaccagcaccaagacatgcttttgagatattcagaaggttctacttagccaaacacagtggtcgacagctcacactccagcatcatatgggttctgcagatctcaatgccacattttatggaccagttaaaaaggaagatggatctgaagttggtgttggaggtgcacaagtaactggctctaatacacggaagcacatattgcaagtttccactttccagatgaccatattaatgctctttaataatagagaaaaatacacatttgaggaaattcagcaagagacagatatccctgaaagagagcttgttagagccctacagtccctcgcctgtggtaaaccaacacagcgggttcttacaaaagaacccaaatcaaaggaaatagaaaatggtcatatatttacagttaatgatcaattcacatccaaactacacagagtcaagattcaaacagttgctgccaaacaaggtgaatccgacccagagaggaaagaaacaaggcagaaagtagacgacgacagaaaacatgagatagaagctgctatagtgcggataatgaaatctagaaagaagatgcagcacaatgttctagtagcggaggtaactcagcagttgaaggcgcgattcttaccaagtccagttgttattaagaaacgtattgaaggacttattgagagagaatatttggcacgaacacctgaggatcgcaaagtatacacatatgtagcataaaatgcgttcagaaatttgatttattcttggactgtactcttcgcatggactgggaagttcttttaaatcattaaatattaagacgaccatctcttctattaaattacagtacatgttctagaccattgagatcaagcctttactccctttgagagtttccaacatcagttgattgagcttcaggctttacaacgtttatccctgtagagatcatctttacagttcctcgggaaaatgtgaatgtgctgcgttttgttttctttactgtatgaaaacagggaaataaaagaggaatttaggaaatacagctcattacaataaaattgttggatttcatttcaaaaaaaaaaaaaaaaaa

SEQ ID NO: 937 - DNA, 1630 bp; single-stranded, linear
  immediate source library: GENBANK
  immediate source clone: g1381147
gaattcggcacgagctcgtgccgcttttggaacagcgatcgtaatcaatcctgagaaagacaaagacatggtccaagacctgttggacttcaaggacaaggtggaccacgtgatcgaggtctgcttccagaagaatgagcggttcgtcaacctgatgaaggagtcctttgagacgttcatcaacaagagacccaacaagcctgcagaactgatcgcaaagcatgtggattcaaagttaagagcaggcaacaaagaagccacagacgaggagctggagcggacgttggacaagatcatgatcctgttcaggtttatccacggtaaagatgtctttgaagcattttataaaaaagatttggcaaaaagactccttgttgggaaaagtgcctcagtcgatgctgaaaagtctatgttgtcaaagctcaagcatgagtgcggtgcagccttcaccagcaagctggaaggcatgttcaaggacatggagctttcgaaggacatcatggttcatttcaagcagcatatgcagaatcagagtgactcaggccctatagacctcacagtgaacatactcacaatgggctactggccaacatacacgcccatggaagtgcacttaaccccagaaatgattaaacttcaggaagtatttaaggcattttatcttggaaagcacagtggtcgaaaacttcagtggcaaactactttgggacatgctgttttaaaagcggagtttaaagaagggaagaaggaattccaggtgtccctcttccagacactggtgctcctcatgttcaacgagggagatggcttcagctttgaggagataaaaatggccacggggatagaggatagtgaattgcgcagaacgctgcagtccctggcctgtggcaaagcacgtgtgctgattaaaagtcccaaaggaaaggaagtggaagatggagacaagttcatttttaatggagagttcaagcacaagttgtttagaataaagatcaatcaaattcagatgaaggagactgttgaggaacaggttagcaccactgagagagtgtttcaggatagacaatatcagattgatgctgctatcgtcagaataatgaagatgagaaagactcttggtcataatcttctagtttctgaattatataatcagctgaaatttccagtaaagcctggagatttgaaaaagagaattgaatctctgatagacagagactatatggagagagacaaagacaatccgaatcagtaccactacgtggcctgacgcatctgcagacggttccccttcatgaaacactagaatgtaccctcagagcaggaagcacacctgtgccatttctgggactctgattgatccagctgtggacattggaaggcgaaggaagggaggtggctcctgggtcatctttcacaaggctcaagacttcaacctgcagatgtatctttttccctccagtttttcctctagttcttttaggcatttaaattgtttctgttactctgtgcaaaataactttgagattggacaagaagatgttactaaagagaagttcctttaaaaggtcttgttcttgtgtcaaaaagctgcaagtttggtttgttctcgtgtgtgatcatgagtgcacaa

SEQ ID NO: 938 - DNA, 932 bp; single-stranded, linear
  immediate source library: GENBANK
  immediate source clone: g1381149
agaaaaatcaatgctgtccaaacttaaacatgaatgcggagctgctttcaccagcaaacttgaaggaatgtttaaagacatggaactttctaaagacatcatgattcagttcaaacagtatatgcagaatcagaatgttccgggaaatattgagttaactgtgaatatcctgacaatgggctattggccgacatatgtgcctatggaagttcatttaccaccagagatggtaaaacttcaggagattttcaagacattttacctaggcaaacatagtggcaggaaacttcagtggcagtcaaccctaggacactgtgtgttaaaagcagaatttaaagagggtaaaaaggaactccaggtctctctttttcaaacactggtgctgctaatgtttaatgagggagaggagttcagtttagaagagatcaagcaggcaactggaatagaggatggagagttaaggagaacattgcagtcattagcctgtggcaaagctagagttctggcgaaaaatccaaagggcaaagacattgaagatggtgacaagttcatttgtaatgatgatttcaaacataaacttttcaggataaagatcaatcaaatccagatgaaagaaacggttgaagaacaagcaagcactacagaaagagtatttcaagacagacagtatcaaattgatgctgcaattgttcgaattatgaagatgagaaagacacttagccacaatctccttgtttcagaagtgtacaaccagttgaaatttccagtaaagcctgctgatcttaagaagagaatagaatctttaattgaccgggactacatggaaagagataaagaaaatccaaaccagtacaactatattgcatagaatgttggccttgcagcatttggtgtcatatgcagtagccagtggataaactaacctgttgatt

SEQ ID NO: 939 - DNA, 2149 bp; single-stranded, linear
  immediate source library: GENBANK
  immediate source clone: g1381163
gacatggccaacatcgcggtgcagcgaatcaagcgggagttcaaggaggtgctgaagagcgaggagacgagcaaaaatcaaattaaagtagatcttgtagatgagaattttacagaattaagaggagaaatagcaggacctccagacacaccatatgaaggaggaagataccaactagagataaaaataccagaaacatacccatttaatccccctaaggtccggtttatcactaaaatatggcatcctaatattagttccgtcacaggggctatttgtttggatatcctgaaagatcaatgggcagctgcaatgactctccgcacggtattattgtcattgcaagcactattggcagctgcagagccagatgatccacaggatgctgtagtagcaaatcagtacaaacaaaatcccgaaatgttcaaacagacagctcgactttgggcacatgtgtatgctggagcaccagtttctagtccagaatacaccaaaaaaatagaaaacctatgtgctatgggctttgataggaatgcagtaatagtggccttgtcttcaaaatcatgggatgtagagactgcaacagaattgcttctgagtaactgaggcatagagagctgctgatatagtcaagcttgcctcttcttgaggagcaccaacatctgttatttttaggattctgcatagatttcttttaatctggcattctcgcctaatgatgttatctaggcaccattggagactgaaaaaaaaaaatccctgctctgtaaataaagctaattaaacgtctgtgtaaatttaaaaaggggaaatactttaattttttttcttaatagtgtaaaaattccctgagctaagctaaaaccatggaagaaacatgctactttagtgtttagcagtgtaccaagactagcaagagtttgcttcaggatttggttgaataattaagataatatttggagtgtgtcagggccattcaaattgttggtgttgcatcacagctaccttaactgtttttaacatggatcctctgtgcctgtgaatttacttgcatgcttgtacttgacttcttaggatgggtagctgaaaagaccaccattttaagcatttgagaattcttaaatatgaaatttattcagaattgaagatggtgacctattcagagcctttttgtccttgtcaacagactgggacagtgtctgattcccccttcacccccccccacccccgccttggcacacacagctaatattctaatggtaaatttctctgtatcaggtggggaaatgtgctgaaggacagtatgtatcccttgcttcatttttaggtcgtaggtttggaatgtcttgtcccagttcttcaaacactcttaaatttttcttaagtaatgtaaaaatggaactgccaattttatttctcttgcaaaaatagtaaatacttgatgttacattattcccaggtttaatgaaagaacccaacttagtttttcagtgaatttgacacctattttttagtgatgaaatttttctttgagaactggcaaggatgcagtcagctgtttgcagtttttagcctgattttggggtctatagagattgctttattggatacttcaagtcattcttgcttgcacttcccctattgacacatgaaagctgtgttggtgttttattgtacatacttcagatgcacataggaatagaagtgtgttataaatctagctttctttatgatgtttctgataatacgagaattgaaaactttaccttctcttgtacatagtcagactatttgtattaaatttacatttcattctaagttccaaaagtttgaaaattattagttttgcaagatcacacactaatgtaaccattttatgaaggttgaagtggatttatgcaggcagttctatatatagaaatncaattctttttaaatttttaggaccaatacaaaataacacaaatgtaatggaatcagactgaattaaagtaaggctgtatattgaaagtcatattataaaaggtttgctttctttaagtgttatttatcttaaattataatcgttaaatgtttggaagataatttttgaatcataacgtcagcataacttcatttgacttctcaataatcttgtcgacgcggccgc

SEQ ID NO: 940 - DNA, 1420 bp; single-stranded, linear
  immediate source library: GENBANK
  immediate source clone: g1381809
cggacgcaagtacatccagacagacagcggcccctactgtgtgccctgctatgacaatacctttgccaacacctgtgctgagtgccagcagcttatcgggcatgactcgagggagctgttctatgaagaccgccatttccacgagggctgcttccgctgctgccgctgccagcgctcactagccgatgaacccttcacccgccaggacagtgagctgctctgcaatgactgctactgcagtgcgttttcctcgcagtgctccgcttgtggggagactgtcatgcctgggtcccggaagctggaatatggaggccaaacatggcatgagcactgcttcctgtgcattggctgtgaacagccactgggctcccgtccttttgtgcccgacaagggtgctcactactgcgtgccctgctatgaaaacaattttgctcctcgctgcgcccgctgcaccaaaacgcttacacagggtggattgacataccgtgatctgccgtggcatccaaaatgtctggtctgtaccggatgccaaaccccctggcagggcaccacttcacctcccgggatgaaaaatccctactgtgtggcctgttttggaaaacctttgcactctaattgctacagctgcaatcgccccactcttatgactcggtggaagcaattattgtgttcctttgaaaaccgacactggcaccaaaattgcttcacctgcgaccgctgctctaactccctggtgggccagggcttcgtaccggatggagaccaagtgctctgccagggctgtatccaggcagggccctaagccagggctcctggaccaaggctttcctataccacgggcccaggactgtggctccttttctaaaccacctctgggactcagctccccccgccaaaaaaaatgggtctccttctgggctccaggattgtctccccactccagcatccccaaactggtactccntgacggccccaatatgggattaaaagggcctcaaaantaaagcccctcccaaaaaatggaatccagaaataaccttttccccgcagtggggttcccagagggagtcctttccccaaatgggggtttagaaccgggccctccaaaatgaaattgggaaataggcccccgaaaatttgaatttttttagagggttagagtttcaaagggggcaggggaagtccttgaaaggggaatgttttaagggttgacctgccccaccccatccccgaggttgaggatgtgggggcagcaaatctggagcccaatgataaggggccctagggaaaagggtgatgcccagcaggttgccaccgagtgtttttttatttgaatttagctccaatttgcccatagatgggcagaggggggagattggtttatcccccttccagaatttgcaataaaggggtgtggggg

SEQ ID NO: 941 - DNA, 1883 bp; single-stranded, linear
  immediate source library: GENBANK
  immediate source clone: g1401351
tgaaggctggttgttcagactgagcttcctgcctgcctgtaccccgccaacagcttcagaagaaggtgactggtggctgcctgaggaataccagtgggcaagagaattagcatttctggagcatctgctgtctgagcagcccctgggtgcgtccactttctgggcacgtgaggttgggccttggccgcctgagcccttgagttggtcacttgaaccttgggaatattgagattatattctcctgccttttaaaaagatggacttcagcagaaatctttatgatattggggaacaactggacagtgaagatctggcctccctcaagttcctgagcctggactacattccgcaaaggaagcaagaacccatcaaggatgccttgatgttattccagagactccaggaaaagagaatgttggaggaaagcaatctgtccttcctgaaggagctgctcttccgaattaatagactggatttgctgattacctacctaaacactagaaaggaggagatggaaagggaacttcagacaccaggcagggctcaaatttctgcctacaggttccacttctgccgcatgagctgggctgaagcaaacagccagtgccagacacagtctgtacctttctggcggagggtcgatcatctattaataagggtcatgctctatcagatttcagaagaagtgagcagatcagaattgaggtcttttaagtttcttttgcaagaggaaatctccaaatgcaaactggatgatgacatgaacctgctggatattttcatagagatggagaagagggtcatcctgggagaaggaaagttggacatcctgaaaagagtctgtgcccaaatcaacaagagcctgctgaagataatcaacgactatgaagaattcagcaaaggggaggagttgtgtggggtaatgacaatctcggactctccaagagaacaggatagtgaatcacagactttggacaaagtttaccaaatgaaaagcaaacctcggggatactgtctgatcatcaacaatcacaattttgcaaaagcacgggagaaagtgcccaaacttcacagcattagggacaggaatggaacacacttggatgcaggggctttgaccacgacctttgaagagcttcattttgagatcaagccccaccatgactgcacagtagagcaaatctatgagattttgaaaatctaccaactcatggaccacagtaacatggactgcttcatctgctgtatcctctcccatggagacaagggcatcatctatggcactgatggacaggaggcccccatctatgagctgacatctcagttcactggtttgaagtgcccttcccttgctggaaaacccaaagtgttttttattcaggcttgtcagggggataactaccagaaaggtatacctgttgagactgattcagaggagcaaccctatttagaaatggatttatcatcacctcaaacgagatatatcccggatgaggctgactttctgctggggatggccactgtgaataactgtgtttcctaccgaaaccctgcagagggaacctggtacatccagtcactttgccagagcctgagagagcgatgtcctcgaggcgatgatattctcaccatcctgactgaagtgaactatgaagtaagcaacaaggatgacaagaaaaacatggggaaacagatgcctcagcctactttcacactaagaaaaaaacttgtcttcccttctgattgatggtgctattttgtttgttttgttttgttttgtttttttgagacagaatctcgctctgtcgcccaggctggagtgcagtggcgtgatctcggctcaccgcaagctccgcctcccgggttcaggccattctcctgct

SEQ ID NO: 942 - DNA, 1981 bp; single-stranded, linear
  immediate source library: GENBANK
  immediate source clone: g1403712
ggcggagaagcagctcgccagccagcagcccgccagccgccgggaggttcgatacaagaggctgttttcctagcgtggcttgctgcctttggtaagaacatgtcgtccatcttgccattcacgccgccagttgtgaagagactgctgggatggaagaagtcagctggtgggtctggaggagcaggcggaggagagcagaatgggcaggaagaaaagtggtgtgagaaagcagtgaaaagtctggtgaagaagctaaagaaaacaggacgattagatgagcttgagaaagccatcaccactcaaaactgtaatactaaatgtgttaccataccaagcacttgctctgaaatttggggactgagtacaccaaatacgatagatcagtgggatacaacaggcctttacagcttctctgaacaaaccaggtctcttgatggtcgtctccaggtatcccatcgaaaaggattgccacatgttatatattgccgattatggcgctggcctgatcttcacagtcatcatgaactcaaggcaattgaaaactgcgaatatgcttttaatcttaaaaaggatgaagtatgtgtaaacccttaccactatcagagagttgagacaccagttttgcctccagtattagtgccccgacacaccgagatcctaacagaacttccgcctctggatgactatactcactccattccagaaaacactaacttcccagcaggaattgagccacagagtaattatattccagaaacgccacctcctggatatatcagtgaagatggagaaacaagtgaccaacagttgaatcaaagtatggacacaggctctccagcagaactatctcctactactctttcccctgttaatcatagcttggatttacagccagttacttactcagaacctgcattttggtgttcgatagcatattatgaattaaatcagagggttggagaaaccttccatgcatcacagccctcactcactgtagatggctttacagacccatcaaattcagagaggttctgcttaggtttactctccaatgttaaccgaaatgccacggtagaaatgacaagaaggcatataggaagaggagtgcgcttatactacataggtggggaagtttttgctgagtgcctaagtgatagtgcaatctttgtgcagagccccaattgtaatcagagatatggctggcaccctgcaacagtgtgtaaaattccaccaggctgtaatctgaagatcttcaacaaccaggaatttgctgctcttctggctcagtctgttaatcagggttttgaagccgtctatcagctaactagaatgtgcaccataagaatgagttttgtgaaagggtggggagcagaataccgaaggcagacggtaacaagtactccttgctggattgaacttcatctgaatggacctctacagtggttggacaaagtattaactcagatgggatccccttcagtgcgttgctcaagcatgtcataaagcttcaccaatcaagtcccatggaaaagacttaatgtaaacaactctctctcggtcaatagcattggtgttgtggtccccctatgggactgtttacctattccaaaaggtttcaaggagagaaaaccagcacttgaggtcctcatccaattaaagcacccttgtggaatcctgtttccctatatttgaatattaggatgggaaaattagtgtctagaaatactctccccattaaagaggaagagaagattttaaagacttaatgatgtcttattgggcataaactgagtgtcccaaaggtttattaataacagtagtagttatgtgtacaggtaatgtatcatgatccagtatcacagtattgtgctgtttatatacatttttagtttgcatagatgaggtgtgtgtgtgcgctgcttcttgatctaggcaaacctttataaagttgcagtacctaaaaaaaaaaaaaaaaaaaaaa

SEQ ID NO: 943 - DNA, 1102 bp; single-stranded, linear
  immediate source library: GENBANK
  immediate source clone: g1405318
gcctggacagtcagcaaggaattgtctcccagtgcattttgccctcctggctgccaactctggctgctaaagcggctgccacctgctgcagtctacacagcttcgggaagaggaaaggaacctcagaccttccagatcgcttcctctcgcaacaaactatttgtcgcaggaataaagatggctgctgaaccagtagaagacaattgcatcaactttgtggcaatgaaatttattgacaatacgctttactttatagctgaagatgatgaaaacctggaatcagattactttggcaagcttgaatctaaattatcagtcataagaaatttgaatgaccaagttctcttcattgaccaaggaaatcggcctctatttgaagatatgactgattctgactgtagagataatgcaccccggaccatatttattataagtatgtataaagatagccagcctagaggtatggctgtaactatctctgtgaagtgtgagaaaatttcaactctctcctgtgagaacaaaattatttcctttaaggaaatgaatcctcctgataacatcaaggatacaaaaagtgacatcatattctttcagagaagtgtcccaggacatgataataagatgcaatttgaatcttcatcatacgaaggatactttctagcttgtgaaaaagagagagacctttttaaactcattttgaaaaaagaggatgaattgggggatagatctataatgttcactgttcaaaacgaagactagctattaaaatttcatgccgggcgcagtggctcacgcctgtaatcccagccctttgggaggctgaggcgggcagatcaccagaggtcaggtgttcaagaccagcctgaccaacatggtgaaacctcatctctactaaaaatactaaaaattagctgagtgtagtgacgcatgccctcaatcccagctactcaagaggctgaggcaggagaatcacttgcactccggaggtagaggttgtggtgagccgagattgcaccattgcgctctagcctgggcaacaacagcaaaactccatctcaaaaaataaaataaataaataaacaaataaaaaattcataatgtg

SEQ ID NO: 944 - DNA, 836 bp; single-stranded, linear
  immediate source library: GENBANK
  immediate source clone: g1418815
atgctgggcatctggaccctcctacctctggttcttacgtctgttgctagattatcgtccaaaagtgttaatgcccaagtgactgacatcaactccaagggattggaattgaggaagactgttactacagttgagactcagaacttggaaggcctgcatcatgatggccaattctgccataagccctgtcctccaggtgaaaggaaagctagggactgcacagtcaatggggatgaaccagactgcgtgccctgccaagaagggaaggagtacacagacaaagcccatttttcttccaaatgcagaagatgtagattgtgtgatgaaggacatgatgtgaacatggaatcatcaaggaatgcacactcaccagcaacaccaagtgcaaagaggaagtgaagagaaaggaagtacagaaaacatgcagaaagcacagaaaggaaaaccaaggttctcatgaatctccaaccttaaatcctgaaacagtggcaataaatttatctgatgttgacttgagtaaatatatcaccactattgctggagtcatgacactaagtcaagttaaaggctttgttcgaaagaatggtgtcaatgaagccaaaatagatgagatcaagaatgacaatgtccaagacacagcagaacagaaagttcaactgcttcgtaattggcatcaacttcatggaaagaaagaagcgtatgacacattgattaaagatctcaaaaaagccaatctttgtactcttgcagagaaaattcagactatcatcctcaaggacattactagtgactcagaaaattcaaacttcagaaatgaaatccaaagcttggtctag

SEQ ID NO: 945 - DNA, 4651 bp; single-stranded, linear
  immediate source library: GENBANK
  immediate source clone: g1418931
atggatacgactgcggcggcggcgctgcctgcttttgtggcgctcttgctcctctctccttggcctctcctgggatcggcccaaggccagttctccgcaggtggctgtacttttgatgatggtccaggggcctgtgattaccaccaggatctgtatgatgactttgaatgggtgcatgttagtgctcaagagcctcattatctaccacccgagatgccccaaggttcctatatgatagtggactcttcagatcacgaccctggagaaaaagccagacttcagctgcctacaatgaaggagaacgacactcactgcattgatttcagttacctattatatagccagaaaggactgaatcctggcactttgaacatattagttagggtgaataaaggacctcttgccaatccaatttggaatgtgactggattcacgggtagagattggcttcgggctgagctagcagtgagctccttttggcccaatgaatatcaggtaatatttgaagctgaagtctcaggagggagaagtggttatattgccattgatgacatccaagtactgagttatccttgtgataaatctcctcatttcctccgtctaggggatgtagaggtgaatgcagggcaaaacgctacatttcagtgcattgccacagggagagatgctgtgcataacaagttatggctccagagacgaaatggagaagatataccagtagcccagactaagaacatcaatcatagaaggtttgccgcttccttcagattgcaagaagtgacaaaaactgaccaggatttgtatcgctgtgtaactcagtcagaacgaggttccggtgtgtccaattttgctcaacttattgtgagagaaccgccaagacccattgctcctcctcagcttcttggtgttgggcctacatatttgctgatccaactaaatgccaactcgatcattggcgatggtcctatcatcctgaaagaagtagagtaccgaatgacatcaggatcctggacagaaacccatgcagtcaatgctccaacttacaaattatggcatttagatccagataccgaatatgagatccgagttctacttacaagacctggtgaaggtggaacggggctcccaggacctccactaatcaccagaacaaaatgtgcagaacctatgagaaccccaaagacattaaagattgctgaaatacaggcaagacggattgctgtggactgggaatccttgggttacaacattacgcgttgccacacttttaatgtcactatctgctaccattacttccgtggtcacaacgagagcaaggcagactgtttggacatggaccccaaagcccctcagcatgttgtgaaccatctgccaccttatacaaatgtcagcctcaagatgatcctaaccaatccagagggaaggaaggagagtgaagagacaattattcaaactgatgaagatgtgcctggtcccgtaccagtaaaatctcttcaaggaacatcctttgaaaataagatcttcttgaactggaaagaacctttggatccaaatggaatcatcactcaatatgagatcagctatagcagtataagatcatttgatcctgcagtcccagtggctggacctccccagactgtatcaaatttatggaacagtacacaccatgtctttatgcatctccaccctggaaccacgtaccagtttttcataagagccagcacggtcaaaggctttggtccagccacagccatcaatgtcaccaccaatatctcagctccaactttacctgactatgaaggagttgatgcctctctcaatgaaactgccaccacaataactgtattgttgagaccagcacaagccaaaggtgctcctatcagtgcttatcagattgttgtggaagaactgcacccacaccgaaccaagagagaagccggagccatggaatgctaccaggttcctgtcacataccaaaatgccatgagtgggggtgcaccgtattactttgctgcagaactacccccgggaaacctacctgagcctgccccgttcactgtgggtgacaatcggacctaccaaggcttttggaaccctcctttggctccgcgcaaaggatacaacatctatttccaggcgatgagcagtgtggagaaggaaactaaaacccagtgcgtacgcattgctacaaaagcagcaacagaagaaccagaagtgatcccagatcccgccaagcagacagacagagtggtgaaaatagcaggaattagtgctggaattttggtgttcatcctccttctcctagttgtcatattaattgtaaaaaagagcaaacttgctaaaaaacgcaaagatgccatggggaatacccggcaggagatgactcacatggtgaatgcaatggatcgaagttatgctgatcagagcactctgcatgcagaagatcctctttccatcaccttcatggaccaacataactttagtccaagatatgagaaccacagtgctacagcagagtccagtcgccttctagacgtacctcgctacctctgtgaggggacggaatccccttaccagacaggacagctgcatccagccatcagggtagctgatttactgcagcacattaatctcatgaagacatcagacagctatgggttcaaagaggaatatgagagcttttttgaaggacagtcagcatcttgggatgtagctaaaaaagatcaaaatagagcaaaaaaccgatatggaaacattatagcatatgatcactccagagtgattttgcaacccgtagaggatgatccttcctcagattatattaatgccaactatattgatggctaccagagaccaagtcattacattgcaacccaaggtcccgttcatgaaacagtgtatgatttctggaggatgatttggcaagaacaatctgcttgcattgtgatggttacaaatttagttgaggttggccgggttaaatgctataaatattggcctgatgatactgaagtttatggtgacttcaaagtaacgtgtgtagaaatggaaccacttgctgaatatgtagttaggacattcaccctggaaaggagggggtacaatgaaatccgtgaagttaaacagttccatttcacgggctggcctgaccatggagtgccctaccatgctacagggctgctttcctttatccggcgagtcaagttatcaaaccctcccagtgctggccccatcgttgtacattgcagtgctggtgctggacgaactggctgctacattgtgattgacatcatgctagacatggctgaaagagagggtgttgttgatatttacaattgtgtcaaagccttaagatctcggcgtattaatatggtccagacagaggaacagtacatttttattcatgatgccattttagaagcctgcttatgtggagaaactgccatacctgtctgtgaatttaaagctgcatattttgatatgattagaatagactcccagactaactcttcacatctcaaggatgaatttcagactctgaattcagtcacccctcgactacaagctgaagactgcagtatagcgtgcctgccaaggaaccatgacaagaaccgtttcatggacatgctgccacctgacagatgtctgccttttttaattacaattgatggggagagcagtaactacatcaatgctgctcttatggacagctacaggcaaccagctgctttcatcgtcacacaataccctctgccaaacactgtaaaagacttctggagattagtgtatgattatggctgtacctccattgtgatgttaaacgaagtcgacttgtcccagggctgccctcagtactggccagaggaagggatgctacgatatggccccatccaagtggaatgtatgtcttgttcaatggactgtgatgtgatcaaccggatttttaggatatgcaatctaacaagaccacaggaaggttatctgatggtgcaacagtttcagtacctaggatgggcttctcatcgagaagtgcctggatccaaaaggtcattcttgaaactgatacttcaggtggaaaagtggcaggaggaatgcgaggaaggggaaggccggacgattatccactgcctaaatggtggcgggcgaagtggcatgttctgtgctataggcatcgttgttgaaatggtgaaacggcaaaatgttgtcgatgttttccatgcagtaaagacactgaggaacagcaagccaaacatggtggaagccccggagcaataccgtttctgctatgatgtagctttggagtacctggaatcatcttagttgggtgagactctttaaagtgcatccatgaagaaacctgtccatctattgagccagcagctgttgtacctgttacacttgtgcagaaagattttaatgtggggggtgggagacttttacatttgagaggtaaaagtattttttttatgaagttgtgtatcttaataaaaagaactgaattagtttttattactatattaaagcatcaacatttcatgccacataaaattatatttaataagaaccagattgaaatgagaacgtattggtgtttgtacagtgaacatgccacctttttccatggtttcaggtagtgcagctaccacatgtt

SEQ ID NO: 946 - DNA, 2109 bp; single-stranded, linear
  immediate source library: GENBANK
  immediate source clone: g1418933
ccagcctcggagggagggattagaagccgctagactttttttcctcccctctcagtagcacggagtccgaattaattggatttcattcactggggaggaacaaaaactatctgggcagcttcattgagagagattcattgacactaagagccagcgctgcagctggtgcagagagaacctccggctttgacttctgtctcgtctgccccaaggccgctagcctcggcttgggaaggcgaggcggaattaaaccccgctccgagagcgcacgttcgcgcgcggtgcgtcggccattgcctgccccgaggggcgtctggtaggcaccccgccctctcccgcagctcgacccccatgatagatacgctcagacccgtgcccttcgcgtcggaaatggcgatcagcaagacggtggcgtggctcaacgagcagctggagctgggcaacgagcggctgctgctgatggactgccggccgcaggagctatacgagtcgtcgcacatcgagtcggccatcaacgtggccatcccgggcatcatgctgcggcgcctgcagaagggtaacctgccggtgcgcgcgctcttcacgcgcggcgaggaccgggaccgcttcacccggcgctgtggcaccgacacagtggtgctctacgacgagagcagcagcgactggaacgagaatacgggcggcgagtcgttgctcgggctgctgctcaagaagctcaaggacgagggctgccgggcgttctacctggaaggtggcttcagtaagttccaagccgagttctccctgcattgcgagaccaatctagacggctcgtgtagcagcagctcgccgccgttgccagtgctggggctcgggggcctgcggatcagctctgactcttcctcggacatcgagtctgaccttgaccgagaccccaatagtgcaacagactcggatggtagtccgctgtccaacagccagccttccttcccagtggagatcttgcccttcctctacttgggctgtgccaaagactccaccaacttggacgtgttggaggaattcggcatcaagtacatcttgaacgtcacccccaatttgccgaatctctttgagaacgcaggagagtttaaatacaagcaaatccccatctcggatcactggagccaaaacctgtcccagtttttccctgaggccatttctttcatagatgaagcccggggcaagaactgtggtgtcttggtacattgcttggctggcattagccgctcagtcactgtgactgtggcttaccttatgcagaagctcaatctgtcgatgaacgatgcctatgacattgtcaaaatgaaaaaatccaacatatcccctaacttcaacttcatgggtcagctgctggacttcgagaggacgctgggactcagcagcccatgtgacaacagggttccagcacagcagctgtattttaccaccccttccaaccagaatgtataccaggtggactctctgcaatctacgtgaaagaccccacacccctccttgctggaatgtgtctggcccttcagcagtttctcttggcagcatcagctgggctgctttctttgtgtgtggccccaggtgtcaaaatgacaccagctgtctgtactagacaaggttaccaagtgcggaattggttaatactaacagagagatttgctccattctctttggaataacaggacatgctgtatagatacaggcagtaggtttgctctgtacccatgtgtacagcctacccatgcagggactgggattcgaggacttccaggcgcatagggtagaaccaaatgatagggtaggagcatgtgttctttagggccttgtaaggctgtttccttttgcatctggaactgactatataattgtcttcaatgaagactaattcaattttgcatatagaggagccaaagagagatttcagctctgtatttgtggtatcagtttggaaaaaaaaatctgatactccatttgattattgtaaatatttgatcttgaatcacttgacagtgtttgtttgaattgtgtttgttttttcctttgatgggcttaaaagaaattatccaaagggagaaagagcagtatgccacttcttaa

SEQ ID NO: 947 - DNA, 3199 bp; single-stranded, linear
  immediate source library: GENBANK
  immediate source clone: g1419373
ggccgcggaaccccaggaggaagctgctgagccatgggcgcctacgcgcgggcttcgggggtctgcgctcgcggctgcctggactcagcaggcccctggaccatgtcccgcgccctgcggccaccgctcccgcctctctgctttttccttttgttgctggcggctgccggtgctcgggccgggggatacgagacatgccccacagtgcagccgaacatgctgaacgtgcacctgctgcctcacacacatgatgacgtgggctggctcaaaaccgtggaccagtacttttatggaatcaagaatgacatccagcacgccggtgtgcagtacatcctggactcggtcatctctgccttgctggcagatcccacccgtcgcttcatttacgtggagattgccttcttctcccgttggtggcaccagcagacaaatgccacacaggaagtcgtgcgagaccttgtgcgccaggggcgcctggagttcgccaatggtggctgggtgatgaacgatgaggcagccacccactacggtgccatcgtggaccagatgacacttgggctgcgctttctggaggacacatttggcaatgatgggcgaccccgtgtggcctggcacattgaccccttcggccactctcgggagcaggcctcgctgtttgcgcagatgggcttcgacggcttcttctttgggcgccttgattatcaagataagtgggtacggatgcagaagctggagatggagcaggtgtggcgggccagcaccagcctgaagcccccgaccgcggacctcttcactggtgtgcttcccaatggttacaacccgccaaggaatctgtgctgggatgtgctgtgtgtcgatcagccgctggtggaggaccctcgcagccccgagtacaacgccaaggagctggtcgattacttcctaaatgtggccactgcccagggccggtattaccgcaccaaccacactgtgatgaccatgggctcggacttccaatatgagaatgccaacatgtggttcaagaaccttgacaagctcatccggctggtaaatgcgcaggcaaaaggaagcagtgtccatgttctctactccacccccgcttgttacctctgggagctgaacaaggccaacctcacctggtcagtgaaacatgacgacttcttcccttacgcggatggcccccaccagttctggaccggttacttttccagtcggccggccctcaaacgctacgagcgcctcagctacaacttcctgcaggtgtgcaaccagctggaggcgctggtgggcctggcggccaacgtgggaccctatggctccggagacagtgcacccctcaatgaggcgatggctgtgctccagcatcacgacgccgtcagcggcacctcccgccagcacgtggccaacgactacgcgcgccagcttgcggcaggctgggggccttgcgaggttcttctgagcaacgcgctggcgcggctcagaggcttcaaagatcacttcaccttttgccaacagctaaacatcagcatctgcccgctcagccagacggcggcgcgcttccaggtcatcgtttataatcccctggggcggaaggtgaattggatggtacggctgccggtcagcgaaggcgttttcgttgtgaaggaccccaatggcaggacagtgcccagcgatgtggtaatatttcccagctcagacagccaggcgcaccctccggagctgctgttctcagcctcactgcccgccctgggcttcagcacctattcagtagcccaggtgcctcgctggaagccccaggcccgcgcaccacagcccatccccagaagatcctggtcccctgctttaaccatcgaaaatgagcacatccgggcaacgtttgatcctgacacagggctgttgatggagattatgaacatgaatcagcaactcctgctgcctgttcgccagaccttcttctggtacaacgccagtataggtgacaacgaaagtgaccaggcctcaggtgcctacatcttcagacccaaccaacagaaaccgctgcctgtgagccgctgggctcagatccacctggtgaagacacccttggtgcaggaggtgcaccagaacttctcagcttggtgttcccaggtggttcgcctgtacccaggacagcggcacctggagctagagtggtcggtggggccgatacctgtgggcgacacctgggggaaggaggtcatcagccgttttgacacaccgctggagacaaagggacgcttctacacagacagcaatggccgggagatccttgagaggaggcgggattatcgacccacctggaaactgaaccagacggagcccgtggcaggaaactactatccagtcaacacccggatttacatcacggatggaaacatgcagctgactgtgctgactgaccgctcccaggggggcagcagcctgagagatggctcgctggagctcatggtgcaccgaaggctgctgaaggacgatggacgcggagtatcggagccactaatggagaacgggtcgggggcgtgggtgcgagggcgccacctggtgctgctggacacagcccaggctgcagccgccggacaccggctcctggcggagcaggaggtcctggcccctcaggtggtgctggccccgggtggcggcgccgcctacaatctcggggctcctccgcgcacgcagttctcagggctgcgcagggacctgccgccctcggtgcacctgctcacgctggccagctggggccccgaaatggtgctgctgcgcttggagcaccagtttgccgtaggagaggattccggacgtaacctgagcgcccccgttaccttgaacttgagggacctgttctccaccttcaccatcacccgcctgcaggagaccacgctggtggccaaccagctccgcgaggcagcctccaggctcaagtggacaacaaacacaggccccacaccccaccaaactccgtaccagctggacccggccaacatcacgctggaacccatggaaatccgcactttcctggcctcagttcaatggaaggaggtggatggttaggtctgctgggatgggccctccaagcccaagcctcctgctccgggggcagaccagactctgactctcctcttggggctgctgccattaaaacgctactactaagaaaaaaaaaaaaaaaaaaaaaaaggaattc

SEQ ID NO: 948 - DNA, 2212 bp; single-stranded, linear
  immediate source library: GENBANK
  immediate source clone: g1431875
gagctctgtcaagatgatagaggtactgacaacaactgactctcagaaactgctacaccagctgaatgccctgttggaacaggagtctagatgtcagccaaaggtctgtggtttgagactaattgagtctgcacacgataatggcctcagaatgactgcaagactaagggactttgaagtaaaagatcttcttagtctaactcagttctttggctttgacacagagacattttctctagctgtgaatttactggacagattcctgtctaaaatgaaggtacagcccaagcaccttgggtgtgttggactgagctgcttttatttggctgtaaaatcaatagaagaggaaaggaatgtcccattggcaactgacttgatccgaataagtcaatatatgtttacggtttcagacttgatgagaatggaaaagattgtattggagaaggtgtgttggaaagtcaaagctactactgcctttcaatttctgcaactgtattattcactccttcaagagaacttgccacttgaaaggagaaatagcattaattttgaaagactagaagctcaactgaaggcatgtcattgcaggatcatattttctaaagcaaagccttctgtgttggcattgtctatcattgcattagagatccaagcacagaagtgtgtagagttaacagaaggaatagaatgtcttcagaaacattccaagataaatggcagagatctgaccttctggcaagagcttgtatccaaatgtttaactgaatattcatcaaataagtgttccaaaccaaatgttcagaagttgaaatggattgtttctgggcgtactgccctgaaatggtcccttaactggattattacagcaccaaaaaacttctctgaagcctttctccacaaccttgttctatggattccataatgttacaatggatttaagctatgaagcctcaaaacatcacgagataagcatgatggtctcagacttgggaaaactgcctaatattatgctgtagtggaattatgtttagatttgaattcatctgtgaagcattcaaatcaaagctaaaagcctaaatgaaatgctaatgacaagcctgagaaggtaaactgtgaatcttcatttctatcattgatctaactttagatattggatcaatatatttaggtggtattgaaaatgctattggaggagtcacactaatactatcaactatcagtcttcccacagcttcaatcactgtcattattctaatcctactcctacttaaattttaagttatgaggtttatgtcaaaagcaacatttcacaatgtacttttaaggcataataagggttaacattctaggcagtataaacacaccccataatgcaagtaataggtaatctagagatgtggactttattgctatatgggaattacatttaaatttgagggcattttatataaagaaaaatacagacctataaagtttggcatattcattaagttatcttttaatatttttttctagaaaacaggtgacatttgtatctacgataaaaatttttatacagaacctactgcctcaaactgaatcccatcaagaaaactagtttctattgtattagtaactcaaaataaattatcacttcgaaaacttgctttcccacactaaggtaagttcagactagattgaacactccagaattttttactacagactgtttttaagttagaagtgatggcaattttataaatagagatatacttccactgatgcccttactgtgccaaaacaaaaatcttaagaaaagcaagtagacaccttcataactatgaatgaagctgctgaagtagtgtttaggatcctccatggcagttagtgaatgtaagaagtacagtgttaaagtgttgtaaacagttactcagtgcaatgtatagcctgagtctatccatgatggctatatccaatttgacatcacgttatggatcactacacaatgaaaaaccaaagaaccacagtatatcttattcttaacttttgtaaaccatgttttatgggtaactttttagttttcccaaaagggtgataaatttcaatattttgaatacatcattgttaattttgagttggcagaggtaaactaaccaactaccattatgttttagtactaagggatatacctttcaataaagttaatgaaattcaaaaaaaaaaaaaaaaaaaa

SEQ ID NO: 949 - DNA, 1434 bp; single-stranded, linear
  immediate source library: GENBANK
  immediate source clone: g1439565
agagaatgtgtatcccagaagaagctggccaaggatatgggagcaaccaccatggaccagaagtctctctgggcaggtgtagtggtcttgctgcttctccagggaggatctgcctacaaactggtttgctactttaccaactggtcccaggaccggcaggaaccaggaaaattcacccctgagaatattgaccccttcctatgctctcatctcatctattcattcgccagcatcgaaaacaacaaggttatcatcaaggacaagagtgaagtgatgctctaccagaccatcaacagtctcaaaaccaagaatcccaaactgaaaattctcttgtccattggagggtacctgtttggttccaaagggttccaccctatggtggattcttctacatcacgcttggaattcattaactccataatcctgtttctgaggaaccataactttgatggactggatgtaagctggatctacccagatcagaaagaaaacactcatttcactgtgctgattcatgagttagcagaagcctttcagaaggacttcacaaaatccaccaaggaaaggcttctcttgactgcgggcgtatctgcagggaggcaaatgattgataacagctatcaagttgagaaactggcaaaagatctggatttcatcaacctcctgtcctttgacttccatgggtcttgggaaaagccccttatcactggccacaacagccctctgagcaaggggtggcaggacagagggccaagctcctactacaatgtggaatatgctgtggggtactggatacataagggaatgccatcagagaaggtggtcatgggcatccccacatatgggcactccttcacactggcctctgcagaaaccaccgtgggggcccctgcctctggccctggagctgctggacccatcacagagtcttcaggcttcctggcctattatgagatctgccagttcctgaaaggagccaagatcacgcggctccaggatcagcaggttccctacgcagtcaaggggaaccagtgggtgggctatgatgatgtgaagagtatggagaccaaggttcagttcttaaagaatttaaacctgggaggagccatgatctggtctattgacatggatgacttcactggcaaatcctgcaaccagggcccttaccctcttgtccaagcagtcaagagaagccttggctccctgtgaaggattaacttacagagaagcaggcaagatgaccttgctgcctggggcctgctctctcccaggaattctcatgtgggattccccttgccaggctggcctttggatctctcttccaagcctttcctgacttcctcttagatcatagattggacctggttttgttttcctgcagctgttgacttgttgccctgaagtacaataaaaaaaattcattttgctccagta

SEQ ID NO: 950 - DNA, 2633 bp; single-stranded, linear
  immediate source library: GENBANK
  immediate source clone: g1439612
ccgcggcaagaacatccctcccagccagcagattacaatgctgcaaactaaggatctcatctggactttgtttttcctgggaactgcagtttctctgcaggtggatattgttcccagccagggggagatcagcgttggagagtccaaattcttcttatgccaagtggcaggagatgccaaagataaagacatctcctggttctcccccaatggagaaaagctcaccccaaaccagcagcggatctcagtggtgtggaatgatgattcctcctccaccctcaccatctataacgccaacatcgacgacgccggcatttacaagtgtgtggttacaggcgaggatggcagtgagtcagaggccaccgtcaacgtgaagatctttcagaagctcatgttcaagaatgcgccaaccccacaggagttccgggagggggaagatgccgtgattgtgtgtgatgtggtcagctccctcccaccaaccatcatctggaaacacaaaggccgagatgtcatcctgaaaaaagatgtccgattcatagtcctgtccaacaactacctgcagatccggggcatcaagaaaacagatgagggcacttatcgctgtgagggcagaatcctggcacggggggagatcaacttcaaggacattcaggtcattgtgaatgtgccacctaccatccgggccaggcagaatattgtgaatgccaccgccaacctcggccagtccgtcaccctggtgtgcgatgccgaacggttcccagagcccaccatgagctggacaaaggatggggaacagatagagcaagaggaagacgatgagaagtacatcttcagcgacgatagttcccagctgaccatcaaaaaggtggataagaacgacgaggctgagtacatctgcattgctgagaacaaggctggcgagcaggatgcgaccatccacctcaaagtctttgcaaaacccaaaatcacatatgtagagaaccagactgccatggaattagaggagcaggtcactcttacctgtgaagcctccggagaccccattccctccatcacctggaggacttctacccggaacatcagcagcgaagaaaagactctggatgggcacatggtggtgcgtagccatgcccgtgtgtcgtcgctgaccctgaagagcatccagtacactgatgccggagagtacatctgcaccgccagcaacaccatcggccaggactcccagtccatgtaccttgaagtgcaatatgccccaaagctacagggccctgtggctgtgtacacttgggaggggaaccaggtgaacatcacctgcgaggtatttgcctatcccagtgccacgatctcatggtttcgggatggccagctgctgccaagctccaattacagcaatatcaagatctacaacaccccctctgccagctatctggaggtgaccccagactctgagaatgattttgggaactacaactgtactgcagtgaaccgcattgggcaggagtccttcgaattcatccttgttcaagcagacaccccctcttcaccatccatcgaccaggtggagccatactccagcacagcccaggtgcagtttgatgaaccagaggccacaggtggggtgcccatcctcaaatacaaagctgagtggagagcagtgggtgaagaagtatggcattccaagtggtatgatgccaaggaagccagcatggagggcatcgtcaccatcgtgggcctgaagcccgaaacaacgtacgccgtaaggctggcggcgctcaatggcaaagggctgggtgagatcagcgcggcctccgagttcaagacgcagccagtccaaggggaacccagtgcacctaagctcgaagggcagatgggagaggatggaaactctattaaagtgaacctgatcaagcaggatgacggcggctcccccatcagacactatctggtcaggtaccgagcgctctcctccgagtggaaaccagagatcaggctcccgtctggcagtgaccacgtcatgctgaagtccctggactggaatgctgagtatgaggtctacgtggtggctgagaaccagcaaggaaaatccaaggcggctcattttgtgttcaggacctcggcccagcccacagccatcccagccaacggcagccccacctcaggcctgagcaccggggccatcgtgggcatcctcatcgtcatcttcgtcctgctcctggtggttgtggacatcacctgctacttcctgaacaagtgtggcctgttcatgtgcattgcggtcaacctgtgtggaaaagccgggcccggggccaagggcaaggacatggaggagggcaaggccgccttctcgaaagatgagtccaaggagcccatcgtggaggttcgaacggaggaggagaggaccccaaaccatgatggagggaaacacacagagcccaacgagaccacgccactgacggagcccgagaagggccccgtagaagcaaagccagagtgccaggagacagaaacgaagccagcgccagccgaagtcaagacggtccccaatgacgccacacagacaaaggagaacgagagcaaagcatgatgggtgaagagaaccgagcaaagatcaaaataaaaagtgacacagcagc

SEQ ID NO: 951 - DNA, 3383 bp; single-stranded, linear
  immediate source library: GENBANK
  immediate source clone: g1457945
agaagagctgagacatccgttcccctacaagaaactctccccgggtggaacaagatggattatcaagtgtcaagtccaatctatgacatcaattattatacatcggagccctgccaaaaaatcaatgtgaagcaaatcgcagcccgcctcctgcctccgctctactcactggtgttcatctttggttttgtgggcaacatgctggtcatcctcatcctgataaactgcaaaaggctgaagagcatgactgacatctacctgctcaacctggccatctctgacctgtttttccttcttactgtccccttctgggctcactatgctgccgcccagtgggactttggaaatacaatgtgtcaactcttgacagggctctattttataggcttcttctctggaatcttcttcatcatcctcctgacaatcgataggtacctggctgtcgtccatgctgtgtttgctttaaaagccaggacggtcacctttggggtggtgacaagtgtgatcacttgggtggtggctgtgtttgcgtctctcccaggaatcatctttaccagatctcaaaaagaaggtcttcattacacctgcagctctcattttccatacagtcagtatcaattctggaagaatttccagacattaaagatagtcatcttggggctggtcctgccgctgcttgtcatggtcatctgctactcgggaatcctaaaaactctgcttcggtgtcgaaatgagaagaagaggcacagggctgtgaggcttatcttcaccatcatgattgtttattttctcttctgggctccctacaacattgtccttctcctgaacaccttccaggaattctttggcctgaataattgcagtagctctaacaggttggaccaagctatgcaggtgacagagactcttgggatgacgcactgctgcatcaaccccatcatctatgcctttgtcggggagaagttcagaaactacctcttagtcttcttccaaaagcacattgccaaacgcttctgcaaatgctgttctattttccagcaagaggctcccgagcgagcaagctcagtttacacccgatccactggggagcaggaaatatctgtgggcttgtgacacggactcaagtgggctggtgacccagtcagagttgtgcacatggcttagttttcatacacagcctgggctgggggtggggtgggagaggtcttttttaaaaggaagttactgttatagagggtctaagattcatccatttatttggcatctgtttaaagtagattagatcttttaagcccatcaattatagaaagccaaatcaaaatatgttgatgaaaaatagcaacctttttatctccccttcacatgcatcaagttattgacaaactctcccttcactccgaaagttccttatgtatatttaaaagaaagcctcagagaattgctgattcttgagtttagtgatctgaacagaaataccaaaattatttcagaaatgtacaactttttacctagtacaaggcaacatataggttgtaaatgtgtttaaaacaggtctttgtcttgctatggggagaaaagacatgaatatgattagtaaagaaatgacacttttcatgtgtgatttcccctccaaggtatggttaataagtttcactgacttagaaccaggcgagagacttgtggcctgggagagctggggaagcttcttaaatgagaaggaatttgagttggatcatctattgctggcaaagacagaagcctcactgcaagcactgcatgggcaagcttggctgtagaaggagacagagctggttgggaagacatggggaggaaggacaaggctagatcatgaagaaccttgacggcattgctccgtctaagtcatgagctgagcagggagatcctggttggtgttgcagaaggtttactctgtggccaaaggagggtcaggaaggatgagcatttagggcaaggagaccaccaacagccctcaggtcagggtgaggatggcctctgctaagctcaaggcgtgaggatgggaaggagggaggtattcgtaaggatgggaaggagggaggtattcgtgcagcatatgaggatgcagagtcagcagaactggggtggatttggtttggaagtgagggtcagagaggagtcagagagaatccctagtcttcaagcagattggagaaacccttgaaaagacatcaagcacagaaggaggaggaggaggtttaggtcaagaagaagatggattggtgtaaaaggatgggtctggtttgcagagcttgaacacagtctcacccagactccaggctgtctttcactgaatgcttctgacttcatagatttccttcccatcccagctgaaatactgaggggtctccaggaggagactagatttatgaatacacgaggtatgaggtctaggaacatacttcagctcacacatgagatctaggtgaggattgattacctagtagtcatttcatgggttgttgggaggattctatgaggcaaccacaggcagcatttagcacatactacacattcaataagcatcaaactcttagttactcattcagggatagcactgagcaaagcattgagcaaaggggtcccatataggtgagggaagcctgaaaaactaagatgctgcctgcccagtgcacacaagtgtaggtatcattttctgcatttaaccgtcaataggcaaaggggggaagggacatattcatttggaaataagctgccttgagccttaaaacccacaaaagtacaatttaccagcctccgtatttcagactgaatgggggtggggggggcgccttaggtacttattccagatgccttctccagacaaaccagaagcaacagaaaaaatcgtctctccctccctttgaaatgaatataccccttagtgtttgggtatattcatttcaaagggagagagagaggtttttttctgttctttctcatatgattgtgcacatacttgagactgttttgaatttgggggatggctaaaaccatcatagtacaggtaaggtgagggaatagtaagtggtgagaactactcagggaatgaaggtgtcagaataataagaggtgctactgactttctcagcctctgaatatgaacggtgagcattgtggctgtcagcaggaagcaacgaagggaaatgtctttccttttgctcttaagttgtggagagtgcaacagtagcataggaccctaccctctgggccaagtcaaagacattctgacatcttagtatttgcatattcttatgtatgtgaaagttacaaattgcttgaaagaaaatatgcatctaataaaaaacaccttctaaaataaaaaaaaaaaaaaaaaaaaaaaaaaa

SEQ ID NO: 952 - DNA, 1505 bp; single-stranded, linear
  immediate source library: GENBANK
  immediate source clone: g1463124
ttatgcaagaaactgttgaattagacccgtttcctatagatgagaaaccatacaagctgtggtatttatgagcctccatttcttatactactgcagtgaaccaacattggatgtgaaaattgccttttgtcagggattcgataaacaagtggatgtgtcatatattgccaaacattacaacatgagcaaaagcaaagttgacaaccagttctacagtgtggaagtgggagactcaaccttcacagttctcaagcgctaccagaatctaaagcctattggctctggggctcagggcatagtttgtgccgcgtatgatgctgtccttgacagaaatgtggccattaagaagctcagcagaccctttcagaaccaaacacatgccaagagagcgtaccgggagctggtcctcatgaagtgtgtgaaccataaaaacattattagtttattaaatgtcttcacaccccagaaaacgctggaggagttccaagatgtttacttagtaatggaactgatggatgccaacttatgtcaagtgattcagatggaattagaccatgagcgaatgtcttacctgctgtaccaaatgttgtgtggcattaagcacctccattctgctggaattattcacagggatttaaaaccaagtaacattgtagtcaagtctgattgcacattgaaaatcctggactttggactggccaggacagcaggcacaagcttcatgatgactccatatgtggtgacacgttattacagagcccctgaggtcatcctggggatgggctacaaggagaacgtggatatatggtctgtgggatgcattatgggagaaatggttcgccacaaaatcctctttccaggaagggactatattgaccagtggaataaggtaattgaacaactaggaacaccatgtccagaattcatgaagaaattgcaacccacagtaagaaactatgtggagaatcggcccaagtatgcgggactcaccttccccaaactcttcccagattccctcttcccagcggactccgagcacaataaactcaaagccagccaagccagggacttgttgtcaaagatgctagtgattgacccagcaaaaagaatatcagtggacgacgccttacagcatccctacatcaacgtctggtatgacccagccgaagtggaggcgcctccacctcagatatatgacaagcagttggatgaaagagaacacacaattgaagaatggaaagaacttatctacaaggaagtaatgaattcagaagaaaagactaaaaatggtgtagtaaaaggacagccttctccttcaggtgcagcagtgaacagcagtgagagtctccctccatcctcgtctgtcaatgacatctcctccatgtccaccgaccagaccctggcatctgacactgacagcagcctggaagcctcggcaggacccctgggttgttgcaggtgactagccgcctgcctgcgaaacccagcgttcttcaggagatgat

SEQ ID NO: 953 - DNA, 1392 bp; single-stranded, linear
  immediate source library: GENBANK
  immediate source clone: g1463128
tctgaaacttgcccacccttcgggatattgcaggacgctgcatcatgagcgacagtaaatgtgacagtcagttttatagtgtgcaagtggcagactcaaccttcactgtcctaaaacgttaccagcagctgaaaccaattggctctggggcccaagggattgtttgtgctgcatttgatacagttcttgggataagtgttgcagtcaagaaactaagccgtccttttcagaaccaaactcatgcaaagagagcttatcgtgaacttgtcctcttaaaatgtgtcaatcataaaaatataattagtttgttaaatgtgtttacaccacaaaaaactctagaagaatttcaagatgtgtatttggttatggaattaatggatgctaacttatgtcaggttattcacatggagctggatcatgaaagaatgtcctaccttctttaccagatgctttgtggtattaaacatctgcattcagctggtataattcatagagatttgaagcctagcaacattgttgtgaaatcagactgcaccctgaagatccttgactttggcctggcccggacagcgtgcactaacttcatgatgaccccttacgtggtgacacggtactaccgggcgcccgaagtcatcctgggtatgggctacaaagagaacgttgatatctggtcagtgggttgcatcatgggagagctggtgaaaggttgtgtgatattccaaggcactgaccatattgatcagtggaataaagttattgagcagctgggaacaccatcagcagagttcatgaagaaacttcagccaactgtgaggaattatgtcgaaaacagaccaaagtatcctggaatcaaatttgaagaactctttccagattggatattcccatcagaatctgagcgagacaaaataaaaacaagtcaagccagagatctgttatcaaaaatgttagtgattgatcctgacaagcggatctctgtagacgaagctctgcgtcacccatacatcactgtttggtatgaccccgccgaagcagaagccccaccacctcaaatttatgatgcccagttggaagaaagagaacatgcaattgaagaatggaaagagctaatttacaaagaagtcatggattgggaagaaagaagcaagaatggtgttgtaaaagatcagccttcagcacagatgcagcagtaagtagcaacgccactccttctcagtcttcatcgatcaatgacatttcatccatgtccactgagcagacgctggcctcagacacagacagcagtcttgatgcctcgacgggaccccttgaaggctgtcgatgataggttagaaatagcaaacctgtcagcattgaaggaactctcacctccgtgggcctgaaatgcttggg

SEQ ID NO: 954 - DNA, 1756 bp; single-stranded, linear
  immediate source library: GENBANK
  immediate source clone: g1468914
tcgggcgcagccgcgaagatgccgttggaactgacgcagagccgagtgcagaagatctgggtgcccgtggaccacaggccctcgttgcccagatcctgtgggccaaagctgaccaactcccccaccgtcatcgtcatggtgggcctccccgcccggggcaagacctacatctccaagaagctgactcgctacctcaactggattggcgtccccacaaaagtgttcaacgtcggggagtatcgccgggaggctgtgaagcagtacagctcctacaacttcttccgccccgacaatgaggaagccatgaaagtccggaagcaatgtgccttagctgccttgagagatgtcaaaagctacctggcgaaagaagggggacaaattgcggttttcgatgccaccaatactactagagagaggagacacatgatccttcattttgccaaagaaaatgactttaaagcgtttttcatcgagtcggtgtgcgacgaccctacagttgtggcctccaatatcatggaagttaaaatctccagcccggattacaaagactgcaactcggcagaagccatggacgacttcatgaagaggatcagttgctatgaagccagctaccagcccctcgaccccgacaaatgcgacagggacttgtcgctgatcaaggtgattgacgtgggccggaggttcctggtgaaccgggtgcaggaccacatccagagccgcatcgtgtactacctgatgaacatccacgtgcagccgcgtaccatctacctgtgccggcacggcgagaacgagcacaacctccagggccgcatcgggggcgactcaggcctgtccagccggggcaagaagtttgccagtgctctgagcaagttcgtggaggagcagaacctgaaggacctgcgcgtgtggaccagccagctgaagagcaccatccagacggccgaggcgctgcggctgccctacgagcagtggaaggcgctcaatgagatcgacgcgggcgtctgtgaggagctgacctacgaggagatcagggacacctaccctgaggagtatgcgctgcgggagcaggacaagtactattaccgctaccccaccggggagtcctaccaggacctggtccagcgcttggagccagtgatcatggagctggagcggcaggagaatgtgctggtcatctgccaccaggccgtcctgcgctgcctgcttgcctacttcctggataagagtgcagaggagatgccctacctgaaatgccctcttcacaccgtcctgaaactgacgcctgtcgcttatggctgccgtgtggaatccatctacctgaacgtggagtccgtctgcacacaccgggagaggtcagaggatgcaaagaagggacctaacccgctcatgagacgcaatagtgtcaccccgctagccagccccgaacccaccaaaaagcctcgcatcaacagctttgaggagcatgtggcctccacctcggccgccctgcccagctgcctgcccccggaggtgcccacgcagctgcctggacaaaacatgaaaggctcccggagcagcgctgactcctccaggaaacactgaggcagacgtgtcggttccattccatttccatttctgcagcttagcttgtgtcctgccctccgcccgaggcaaaacgtatcctgaggacttcttccggagagggtggggtggagcagcgggggagccttggccgaagagaaccatgcttggcaccgtctgtgtcccctcggccgct

SEQ ID NO: 955 - DNA, 2608 bp; single-stranded, linear
  immediate source library: GENBANK
  immediate source clone: g1468978
ccgccatgcccggctaatttttgtatttttagtagagacggggtttcgccatgttggaaggctggtcttgaacccctgacctcaggtgatctgcccaccttggcctcccaaagtgctaggattacaggcatgagccacagctcccggtctatcatttaaccttaattacatctttaaaggcccaaatagtctcacccactccaaatagtcacacccacaccggaggttgagcacttcaacacatgaatttggggaggacacagttcagtccataacatccccctaatttttaaaaaataaaaatgtttttaaggagtgaatgtcttttatgtgtctctgtgaccaggtcccgctgccttgatggattatacacttgacctcagtgtgacaacagtgaccgactactactaccctgatatcttctcaagcccctgtgatgcggaacttattcagacaaatggcaagttgctccttgctgtcttttattgcctcctgtttgtattcagtcttctgggaaacagcctggtcatcctggtccttgtggtctgcaagaagctgaggagcatcacagatgtatacctcttgaacctggccctgtctgacctgctttttgtcttctccttcccctttcagacctactatctgctggaccagtgggtgtttgggactgtaatgtgcaaagtggtgtctggcttttattacattggcttctacagcagcatgtttttcatcaccctcatgagtgtggacaggtacctggctgttgtccatgccgtgtatgccctaaaggtgaggacgatcaggatgggcacaacgctgtgcctggcagtatggctaaccgccattatggctaccatcccattgctagtgttttaccaagtggcctctgaagatggtgttctacagtgttattcattttacaatcaacagactttgaagtggaagatcttcaccaacttcaaaatgaacattttaggcttgttgatcccattcaccatctttatgttctgctacattaaaatcctgcaccagctgaagaggtgtcaaaaccacaacaagaccaaggccatcaggttggtgctcattgtggtcattgcatctttacttttctgggtcccattcaacgtggttcttttcctcacttccttgcacagtatgcacatcttggatggatgtagcataagccaacagctgacttatgccacccatgtcacagaaatcatttcctttactcactgctgtgtgaaccctgttatctatgcttttgttggggagaagttcaagaaacacctctcagaaatatttcagaaaagttgcagccaaatcttcaactacctaggaagacaaatgcctagggagagctgtgaaaagtcatcatcctgccagcagcactcctcccgttcctccagcgtagactacattttgtgaggatcaatgaagactaaatataaaaacattttcttgaatggcatgctagtagcagtgagcaaaggtgtgggtgtgaaaggtttccaaaaaaagttcagcatgaaggatgccatatatgttgttgccaacacttggaacacaatgactaaagacatagttgtgcatgcctggcacaacatcaagcctgtgattgtgtttattgatgatgttgaacaagtggtaactttaaaggattctgtatccaagtgaaaaaaaaagatgtctgacctccttcatatgcaaaaatataccttcagagactgtcagtaggctggaagaagtggatattgaagttttgacatcaatgatgaggctccagttgtctatgcattgactgatggtgaaatggctggagtgattctgaatcaaggtgattgtgattatagtgacaatgaagatgatgctattaatactgcataaaaagtgcctgtagatgacatggtgaaaatatttgacaggcttatggaaggactacagcagcacgcattcataacagaacaagaaattatctcagcttataaaatcaaacagagacttctagacaaaaaccattgttgatgaggcagatgcctctagaagagacgtttaaaagccatcaaacacaatgcctcatcttccctggaggacccacttcctgatccctcaactgtgtctgatgtttcttctcatgtaagaaataaaaaataaaaataaaaaaatatatattggtatgtaactacaggaaaaaaataaaaaatatatagtggacagtaacctttcaatcaaaactcagtatcataagtagagactgaaaacttgccgttattgattgttgttattaacagctgatacaggtattctgctgatgctactgctgcctagttaccatgaacacgttttttcactattaatggtgcgtcatattttttacttttaagtacttacgtgtgagtaagtgtaagaaaatgattgcttatcagtagtatcaatgatttactcaatatctgaatcaccttgattcagaaccatttcagctgtttcaccatcagtcaatgaataacagcctcattgatgtcaaaaacttcaatatccacttctttcagcctactgtagactctggaagtatactttttgcatatgtaaggaagtcagattttttttt

SEQ ID NO: 956 - DNA, 4612 bp; single-stranded, linear
  immediate source library: GENBANK
  immediate source clone: g1469178
cgaccgatatagctcgccaggtgggtgaaggttgccgaactgtccccctggctggacatgtggggtttgacagcttgcctgaccagctggtgaataagtccgtcagccagggcttctgcttcaacatcctgtgcgtgggagagacaggtttgggcaagtccaccctcatggacaccctgttcaacaccaaattcgaaggggagccagccacccacacacagccgggtgtccagctccagtctaatacctatgacctccaagagagcaacgtgaggctaaagctcacgatcgttagcacagttggctttggggaccagatcaacaaagaggacagctacaagcctatcgtggaattcatcgatgcacaattcgaggcctacctgcaggaagagctaaagatccgaagagtgctacacacctaccatgactcccgaatccatgtctgcttgtatttcattgcccccacgggtcattccctgaagtctctggacctagtgactatgaagaagctggacagtaaggtgaacatcatccccatcattgccaaagcagatgccatttcgaagagtgagctaacaaagttcaaaatcaaaatcaccagcgagcttgtcagcaacggagtccagatctatcagtttcctacagatgatgagtcggtggcagagatcaatggaaccatgaacgcccacctgccgtttgctgtcattggcagcacagaagaactgaagataggcaacaagatgatgagggcgcggcagtatccttggggcactgtgcaggttgaaaacgaggcccactgcgactttgtgaagctgcgggagatgctgattcgggtcaacatggaggatctgcgggagcagacccacacccggcactatgagctgtatcgccgctgtaagctggaggagatgggcttcaaggacaccgaccctgacagcaaacccttcagtttacaggagacatatgaggccaaaaggaacgagttcctaggggaactccagaaaaaagaagaggagatgagacagatgttcgtccagcgagtcaaagagaaagaagcggagctcaaagaggcagagaaagagctgcacgagaagtttgaccgtctgaagaaactgcaccaggacgagaagaagaaactggaggataagaagaaatccctggatgatgaagtgaatgctttcaagcaaagaaagacggcggctgagctgctccagtcccagggctcccaggctggaggctcacagactctgaagagagacaaagagaagaaaaattaactctgctgtttgctgcatgctgcatgagacccagggtcctgtttgggcttcctgtagacacccttttcctgcgcaacagagctgggcctccctttctctaatttcccccttaacatgcctggggggcatacaatccaacccgcgccctctcctctcttcctgccaaggtttatagaaacctgagaatctgagggtgatgtctggccgctggtcaagaagccaacagtcatgtggctcgcagatgcatcctgcatcccagtccccctcccagcacccccagccatcccccctgtcttcccccacatctttgccagaggtgtgacatggtcagggggcccatctgctactctttcccaccagctcccctgttccagttctggttgctgttagtttccctgaggtatttgcaaccaccatggctgggtaaccaccgatcagcacagctgtccccttggtctcctgtatcccagtcactagtcctccctggtccaccccaccctcatcctcaggagccacagccatttcttagagggtttcaaaaggacagcctttggcgccttttccttctaacctttgagtccagccctttccagttttcattcactcgaagtaactgcactcaagctgtgctcaaaatcggcaacgcatttatttacaccaagcccttcccataaaacacaactgctgaagaaaatagcagacgtttcccctctctctaactctgggtatcccacagatgcaaaagggagaataaacctgaatattattaccagcctagagtcttgaatgatagccttaccgaattcttcttgtgaggtatttcagcatctcggggggtaatttccggaagggctccatactgtcccaataaggtgaggccagtagcaggaataataaatcccactttgtaggctggaaaactgagctgtcaaaagaatcaagtgtttgggggtttgctctgatgagtcttctagttcatttggtgaatgtcatgatgatttttaacatgcattttgcatgcatcccccaataagaagagatgagactcggctggagagaagaaaaggcccttaactttctttccaatttaaggagttgagagtttaaaaatattccagccctaagtttttatcatgggtcccatctgatagtggctttgggaacctctgtgaagtagagagccctcccttgtcagggttatgaggcacagtggcctttggtgtttggccagtgacagtgtgagagatggagttgacctggcaatgatctgtggctaacatgccgtctctctgcccttcctttgcagtaatccatggctgtgtactgaatagtattccccgctacagctggactggactccatttagccttttaagccgaggttcctattttaactgacagctttcctttggggtgccaggcagcgaggccccccacccctatcctgccatgtacttcaagctcacttcttctttttgagttccgcaacttgctcctgcctcccagccccactggcactgaccatgaccacctacttctattttttttttagagtttctttttttgatcacttactttcaaagcacacagtcaaacaaggttatgccaaatttccaggcctttttgaagtattgagaaggggaaggggatttctcacttcaattatagatcataataggaagcaaaaagaaaaaaatgaaaagcaaacatatgcacgcacttttcttgttgacaaagcaagaatataggtttgctgtgtaggtttggtgctctattgattggtgagtgaccagagcaagtatgaaggtgatgctgccaaagcacaagcctttttgaagtattgagaaggggaaggggatttctcacttcaattatagatcataataggaagcaaaaagaaaaaaatgaaaagcaaacatatgcacgcacttttcttgttgacaaagcaagaatataggtttgctgtgtaggtttggtgctctattgattggtgagtgaccagagcaagtatgaaggtgatgctgccaaagcacaagccagtttcttgggaaaattcaagttacagtggagtatttttttgaagaccatatgcttggaggtagaaacaaaccaacgaccaaaaaaaaaaaaaaaaaatctgctcagatactcagccagtagctcagagagatgctgagttaggcctgtcaggtctccttgggaaaggcttcatatttgcaactttgatgattctatgtccagcttcagagctgctttcccagaaattcacgcttaaacaaccaaccggtaaccaccacttccccacaccgccgcccggtaattatttgcattacaaaccggaggcgccctcatttgcatttgtgtacagattaactagttaaggcttgagaagctctgaataattcaaaagtattagacccacacagccttggagagaccttcagaaactaaggaggagttttatattaagggagacattttagtcagtaagacgatataacctacttactccgtaaggggaaatgaaggcccagagaagggaagggacttgaccgaggtcccacttctgtttcgaggcagaagccagactaattttcatgcctcctgactcccaatcagtttcacaaagggattcaatctgtttatatacgttacattcctggatacgaggtcttttgatgttcagagtaactgactagttagtattagaagaccctcgaggtttttttccacagaaaaacatctgaagatggattgggtgagggctggcaaaacgaaggcatgccgggccagctccttaacccaatgacccagtgatgctgcaaggctggaacggggtccaggagactgtgtgtaacaggtgccctaggtgacccttataatcagggaagtttggtgaacaaaaatcgaacccatgagtgaacataaattaaaaagttgatcaacctattaaaatgtgtatttcattgggtagcttttctcactgtagacagattttttccttcttcaatgaaaaggcttttaaattagtacaactgttactatttaaaaaaaaaataccctaagtactctgtttacttctggtgaaacaaaaccagtcattagaaatggtctgtgcttttattttcccagactggagtggcttttctgaaacacacacacacacacacacacacacacacacgtacacacatccctcacttctcttaagccaagaagtttgctttccctagctgcagtgtagatggctcttgtttttgtttttttgttttaatcatttggcattcacatgtggctgttaatatgtgcttgtttttaattaaaacaagaagcttt

SEQ ID NO: 957 - DNA, 3048 bp; single-stranded, linear
  immediate source library: GENBANK
  immediate source clone: g1478067
ccttcaatgtgaagctaatatctcctatagcatagttaatgtttattcaacaaatattcatgcagcggagtcaagaacacaccacgatggcggagaaaggaagagacgccgagcggccgagtgcggccgagcaaagccggagccggagcggggccgcaggagacgggccgggtccggacgggccgagatgccctataaactgaaaaaggagaaggagccccccaaggttgccaaatgcacagccaagcctagcagctcgggcaaggatggtggaggcgagaacactgaggaggcccagccgcagccccagccccagccccagccccaagcccagtctcagccaccgtcatccaacaagcgtcccagcaatagcacgccgccccccacgcagctcagcaaaatcaagtactcaggggggccccagattgtcaagaaggagcgacggcaaagctcctcccgcttcaacctcagcaagaatcgggagctgcagaagcttcctgccctgaaagattcgccaacccaggagcgggaggagctgtttatccagaagctacgccagtgctgtgtcctctttgacttcgtgtcagacccactcagtgacctcaaattcaaggaggtgaagcgggcaggactcaacgagatggtggagtacatcacccatagccgtgatgttgtcactgaggccatttaccctgaggctgtcaccatgttttcagtgaacctcttccggacgctgccaccttcatcgaatcccacaggggctgagtttgacccagaggaagatgagcccaccctggaagctgcttggccacatctccagctcgtgtatgagttcttcttacgtttccttgagtctcctgatttccagccaaacatagccaagaagtacatcgaccagaagtttgtacttgctctcctagacctatttgacagtgaggatcctcgagagcgggacttcctcaagaccattttgcatcgcatctatggcaagtttttggggctccgggcttatatccgtaggcagatcaaccacatcttctacaggttcatctacgagacggagcatcacaacgggattgctgagctcctggagatcctgggcagcatcatcaatggctttgctctgccccttaaagaagagcacaagatgttcctcatccgtgtcctacttccccttcacaaggtcaagtccctgagtgtctaccaccctcagctggcatactgtgtggtacaattcctggagaaggagagcagtctgactgagccggtaattgtgggacttctcaagttttggcccaagacccacagccccaaggaggtgatgttcttgaatgagctggaggagattctggacgtcattgaaccttctgagttcagcaaagtgatggaacccctcttccgccagctggccaagtgtgtctctagcccccatttccaggtggcagagcgtgctctctattactggaacaatgagtacatcatgagcctgataagtgacaatgctgcccgagtcctccccatcatgttccctgcactctacaggaactccaagagccactggaacaagacaatccatggactgatctataatgccctgaagttgtttatggaaatgaatcagaagctgtttgatgactgcacacaacaatacaaggcagagaagcagaagggccggttccgaatgaaggaaagggaagagatgtggcaaaaaatcgaggagctggcccggcttaatccccagtatcccatgttccgagcccctccaccactgccccctgtgtactcgatggagacagagacccccacagctgaggacatccagcttctgaagaggactgtggagactgaggctgttcagatgctaaaagacatcaagaaggagaaagtgctgctgcggaggaagtcggagctgccccaggacgtgtacaccatcaaggcactggaggcgcacaagcgggcggaagagttcctaactgccagccaggaggctctctgacccctcacgttcctaccacagggccacagcccacacagccctgggacactgccctggccctccatactctgctccctactggctgtcttgggggaaggcagcgcctctctagctactcaagggagggggatgtgggcacttgaagcagggacacccacagaatggtccctcttctccccaaaaggtgttcatgcctccctgtggctagtacaggctgagcactaagatgcttagtgctcagacaacctggggatgcctgtcccctacctgctcctcacccacagctacctgaggctgctctgagaagtacacacaggaatacatacgctcctctattcttcccttcatcctcatttgaacgccaggtatctcccctcctctctctcccctgcagaggcatgtagggaacagcaggagattattctcaccaaagttatgtcaagccccattggtcccagagtagctgaagggaagccaacccccctgcagcacaaataggccccccagtcccagccgtgtgctggcagatagggttgtattatttcttcttaccccatgcctgaccaagggaggtcaaaaggagaaaagtataggctgtggacaataactgatgaatatagggcccagatggaccaagtggggccggggagggatgaataaacaccctaccccgtgccctgtctttggtgagcagcagccctggggtcacagacatggaagggaccaccctggggctgactgcttttctgtgctgttggttcccaaaactagaaagaaggaagcagggagcggtgccccaagcatggctcctgccaacacctatttatttccttgtttgtgctatgctgggcaggccttctcttgtcccttataggtaccttggaggggccaggggctgaggaaggccggacccaggttccaggggcgcaggcagtgcggcttttggctgtgtacatagggtgctttattctccacagagtgatacatgctaaggtgggttgggcttggaccgatgtccccatatgtacagaactgaataaagtgggtctctg

SEQ ID NO: 958 - DNA, 2588 bp; single-stranded, linear
  immediate source library: GENBANK
  immediate source clone: g1479978
gctttctcctagggactgtgaggggcgcttctgactttggacttgagcactgcctgggacctgtgctgagagagcgctagcatgtctcagtggaatcaagtccaacagttagaaatcaagtttttggagcaggtggatcaattctatgatgacaactttcccatggaaattcggcatctgttggcccaatggattgaaaatcaagactgggaggcagcttctaacaatgaaaccatggcaacgattcttcttcaaaacttgttaatacaactggatgaacagttaggtcgtgtttccaaagagaaaaacctactcttgatacacaatctaaaaagaattaggaaggtccttcagggaaaatttcatggaaatccaatgcatgtagctgtggttatttcaaactgtttaagggaagagaggagaatattggctgcagccaacatgcctgtccaggggcctctagagaaatccttacaaagttcttcagtttcagaaagacagaggaatgtggagcacaaagtggctgccattaaaaacagtgtgcagatgacagaacaagataccaaatacttagaagatctgcaagacgaatttgactacaggtataaaacaattcagacaatggatcagagtgacaagaatagtgccatggtgaatcaggaagttttgacactgcaggaaatgcttaacagcctcgatttcaagagaaaggaggctctcagtaaaatgacccaaatcatccatgagacagacctgttaatgaacaccatgctcatagaagagctgcaagactggaagcggcggcagcaaatcgcctgcatcgggggtccactccacaatgggctcgaccagcttcagaactgctttacactattggcagaaagtcttttccaactgagaaggcaattggagaaactagaggagcaatctaccaaaatgacatatgaaggtgatcccattccaatgcaaagaactcacatgctagaaagagtcaccttcttgatctacaaccttttcaagaactcatttgtggttgagcgacagccatgtatgccaacccaccctcagaggccgttggtacttaaaaccctaattcagttcactgtaaaactaaggctactaataaaattgccagaactaaactatcaggtaaaggttaaggcatcaattgacaagaatgtttcaactctaagcaaccgaagatttgtactttgtggaactaatgtcaaagccatgtctattgaagaatcttccaatgggagtctctcagtagaatttcgacatttgcaaccaaaggaaatgaagtccagtgctggaggtaaaggaaatgagggctgtcacatggtgactgaagaacttcattccataacgtttgaaacacagatctgcctctatggcctgaccatagatttggagaccagctcattgcctgtggtgatgatttccaatgtcagtcagttacctaatgcttgggcatccatcatttggtacaacgtgtcaaccaacgattcccagaacttggttttctttaataatcctccacctgccacattgagtcaactactggaggtgatgagctggcagttttcatcgtacgttggtcgtggtcttaactcagatcaactccatatgctggcagagaagcttacagtccaatctagctacagtgatggtcacctcacctgggccaagttctgcaaggaacatttacctggtaaatcatttaccttttggacatggcttgaagcaatattggatctaattaagaaacacattcttcccctttggattgatgggtatgtcatgggctttgttagcaaagagaaggaacggctgttgctaaaggataaaatgcctggcacctttttattaagattcagtgaaagccatctcggaggaataactttcacctgggtggaccattctgaaagtggggaagtgagattccactctgtagaaccctacaataaaggccggttgtctgctctgccattcgctgacatcctgcgagactacaaagttattatggctgaaaacattcctgaaaaccctctgaagtacctatatcctgacattcccaaagacaaagccttcggtaaacactacagctctcagccttgcgaagtttcaagaccaacagaaaggggtgacaaaggttatgttccttctgtttttatccccatctcaacaatccgaagtgattcaacagagccacattctccatcagaccttcttcccatgtctccaagtgtgtatgcggtgttgagagaaaacctgagtcccacaacaattgaaactgcaatgaagtctccttattctgctgaatgacaggataaactctgacgcaccaagaaaggaagcaaatgaaaaagtttaaagactgttctttgcccaataaccacattttatttcttcagctttgtaaataccaggttctaggaaatgtttgacatctgaagctctcttcacactcccgtggcactcctcaattgggagtgttgtgactgaaatgcttgaaaccaaagcttcagataaacttgcaagataagacaactttaagaaaccagtgttaataacaatattaacag

SEQ ID NO: 959 - DNA, 1717 bp; single-stranded, linear
  immediate source library: GENBANK
  immediate source clone: g1480480
aagcttcagctctttccttcctcaatccttctcctggcacctctgatatgccttttgaaattcatgttaaagaatccctaggctgctatcacatgtggcatctttgttgagtacatgaataaatcaactggtgtgttttacgaaggatgattatgcttcattgtgggattgtatttttcttcttctatcacagggagaagtgaaatgacaacctcactagatacagttgagacctttggtaccacatcctactatgatgacgtgggcctgctctgtgaaaaagctgataccagagcactgatggcccagtttgtgcccccgctgtactccctggtgttcactgtgggcctcttgggcaatgtggtggtggtgatgatcctcataaaatacaggaggctccgaattatgaccaacatctacctgctcaacctggccatttcggacctgctcttcctcgtcacccttccattctggatccactatgtcagggggcataactgggtttttggccatggcatgtgtaagctcctctcagggttttatcacacaggcttgtacagcgagatctttttcataatcctgctgacaatcgacaggtacctggccattgtccatgctgtgtttgcccttcgagcccggactgtcacttttggtgtcatcaccagcatcgtcacctggggcctggcagtgctagcagctcttcctgaatttatcttctatgagactgaagagttgtttgaagagactctttgcagtgctctttacccagaggatacagtatatagctggaggcatttccacactctgagaatgaccatcttctgtctcgttctccctctgctcgttatggccatctgctacacaggaatcatcaaaacgctgctgaggtgccccagtaaaaaaaagtacaaggccatccggctcatttttgtcatcatggcggtgtttttcattttctggacaccctacaatgtggctatccttctctcttcctatcaatccatcttatttggaaatgactgtgagcggagcaagcatctggacctggtcatgctggtgacagaggtgatcgcctactcccactgctgcatgaacccggtgatctacgcctttgttggagagaggttccggaagtacctgcgccacttcttccacaggcacttgctcatgcacctgggcagatacatcccattccttcctagtgagaagctggaaagaaccagctctgtctctccatccacagcagagccggaactctctattgtgttttaggtcagatgcagaaaattgcctaaagaggaaggaccaaggagatgaagcaaacacattaagccttccacactcacctctaaaacagtccttcaaacttccagtgcaacactgaagctcttgaagacactgaaatatacacacagcagtagcagtagatgcatgtaccctaaggtcattaccacaggccaggggctgggcagcgtactcatcatcaaccctaaaaagcagagctttgcttctctctctaaaatgagttacctacattttaatgcacctgaatgttagatagttactatatgccgctacaaaaaggtaaaactttttatattttatacattaacttcagccagctattgatataaataaaacattttcacacaatacaataagttaactattttattttctaatgtgcctagttctttccctgcttaatgaaaagctt

SEQ ID NO: 960 - DNA, 2380 bp; single-stranded, linear
  immediate source library: GENBANK
  immediate source clone: g1480921
ccggatgccagtcaggatgatgggcctgctgttgagcgaccatccacagagctctgaggggcaggaaagcagcattctggaggggagagctttgtgcttgtcattccagagtgctgaggccagggctgatggtcttaaatgctcattttctggtttggcatggtgagtgttggggttgacatttagaactttaagtctcacccattattaggaatattgtgattctgtttattgttccagaatgctgaagtccttgttagcccttcagattgttaggagtggttctcatttggtctgccagaatactgggttcttagttgacaacctagaatgtcagatttctggttgatttgtaacacagtcattctaggatgtggagctactgatgaaatctgctagaaagttagggggttcttattttgcattggagaatcttgactttctgattggtgattcaaagtgttgtgttcctggctgatgatccagaacagtggctcgtatcccaaatctgtcagcatctggctgtctagaatgtggatttgattcattttcctgttcagtgagatatcatcgagacggagatcctaaggtccaacaagaatgcattccctgaatctgtgcctgcactgagagggcaaggaggtggggtgttcttcttgggacccccactaagaccctggtctgaggatgtagagagaacaggtgggctgtattcacgccattggttgcaagctaccagagctctatccccatccaggtcttgactcatggcagctgtttctcatgaagctaataaaattgcgtttctaaagttacctgttatatatctcttttggtcccatcctctaaagcagaggcaacactggaacatggctagcctttcttgtagccatggctgggcgtgctagaggttgcagcatgagactttctgctggcatccttgggcccatcactgtatagacatgctaccactggtacttcctttctccctgcgggccaggcactgccttttcaggaagctctcttaaaatacccattgccccagaccctggaagctctcccattcagttcccaccatctgattaaaacaacttcctcccttacagagcatacaacagagggggcaccggggaggagagcacatactgtgttccaatttcaaccttttaattctcatttgttctcacaccaccagtgtgaagtgcgtggtataatctccatttcaaaaccaaggaagcagcctcagagtggtcgagtgacacacctcacgcaggctgcgtccagagcttgtgctcctcttgattcctggtttgactcagttccaggcctaatcttgcctgtctggctcagggtcaaagacagaatggtggcgtgtagcctccacctgatattcaggctattcattcagtcccaaatatgtattttcctaagtgtttactatgtgccagttcctgtaacaggtgtggggacacagccgtgagtaatcaatacagacaaggttctgcccttatggagctgagactccagtggcagacaaacagaccataaataaggaaacgatgaaataagatatatacaaggtgagtgtgacttcccttctaaccccctctgctctgtcctcccctattgcgctctcaagaccagagacccaacagcagtgatgcttcagcaagcagccctccactccagctctgagacccttttctcaggacctctgtaggcagcagcgagagaggacagaggggtaagatgaggggttgagggaaggttcttcatgatccacactttgggcttagtatttctcaggaagagctatggcccagaaacaacaggggaaactagagttcggtctgacagtccttggggttaagtctcctgtcttatggtccagaaagtcctgtttctccttagttggctccaaactgctcccatcattccttctggcctctgctgaatgcagggaatgcaatccttccctgctcttgcagttgctctgacgtagaaagatccttcgggtgctggaagtctccatgaagagcttgtgtcctgtcctttcttgcagattctatttcccctcttctgctaatacctcttactttgcttgagaatcctctcctttcttattaatttcagtcttggtggttctatcaggggtgcattctggccaaggggtgggcctgtgaatcaatcctgggcaatcagacaccctctccttaaaaactggcccgtggagactgagatcactgactctgactcatccccacagctggctctgacaagatggtccatttgttcctgcttccgagatccccaggggcagcctggatccctgcccttctcaagactttagcttttccttccatccggtggcctattccag

SEQ ID NO: 961 - DNA, 1298 bp; single-stranded, linear
  immediate source library: GENBANK
  immediate source clone: g1483349
ggtgcctgtcggcggggagagaggcaatatcaaggttttaaatctcggagaaatggctttcgtttgcttggctatcggatgcttatatacctttctgataagcacaacatttggctgtacttcatcttcagacaccgagataaaagttaaccctcctcaggattttgagatagtggatcccggatacttaggttatctctatttgcaatggcaacccccactgtctctggatcattttaaggaatgcacagtggaatatgaactaaaataccgaaacattggtagtgaaacatggaagaccatcattactaagaatctacattacaaagatgggtttgatcttaacaagggcattgaagcgaagatacacacgcttttaccatggcaatgcacaaatggatcagaagttcaaagttcctgggcagaaactacttattggatatcaccacaaggaattccagaaactaaagttcaggatatggattgcgtatattacaattggcaatatttactctgttcttggaaacctggcataggtgtacttcttgataccaattacaacttgttttactggtatgagggcttggatcatgcattacagtgtgttgattacatcaaggctgatggacaaaatataggatgcagatttccctatttggaggcatcagactataaagatttctatatttgtgttaatggatcatcagagaacaagcctatcagatccagttatttcacttttcagcttcaaaatatagttaaacctttgccgccagtctatcttacttttactcgggagagttcatgtgaaattaagctgaaatggagcatacctttgggacctattccagcaaggtgttttgattatgaaattgagatcagagaagatgatactaccttggtgactgctacagttgaaaatgaaacatacaccttgaaaacaacaaatgaaacccgacaattatgctttgtagtaagaagcaaagtgaatatttattgctcagatgacggaatttggagtgagtggagtgataaacaatgctgggaaggtgaagacctatcgaagaaaactttgctacgtttctggctaccatttggtttcatcttaatattagttatatttgtaaccggtctgcttttgcgtaagccaaacacctacccaaaaatgattccagaatttttctgtgatacatgaagactttccatatcaagagacatggtattgactcaacagtttccagtcatggccaaatgttcaatatgagtctcaataaactgaatttttcttgcgaatgttg

SEQ ID NO: 962 - DNA, 4424 bp; single-stranded, linear
  immediate source library: GENBANK
  immediate source clone: g1486366
agatctctccagatcacactgtcacgtgtacctagcacatctcgagaactcctttgggccgtctggggcccgggaaggaagcctgagttctcaagattccaggactgagagtgccagcttgtctcaaagccaggtcaatggtttctttgccagccatttaggtgaccaaacctggcaggaatcacagcatggcagcccttccccatctgtaatatccaaagccaccgagaaagagactttcactgatagtaaccaaagcaaaactaaaaagccaggcatttctgatgtaactgattactcagaccgtggagattcagacatggatgaagccacttactccagcagtcaggatcatcaaacaccaaaacaggaatcttcctcttcagtgaatacatccaacaagatgaattttaaaacttttccttcatcacctcctaggtctggagatatctttgaggttgaactggctaaaaatgataacagcttggggataagtgtcacgggaggtgtgaatacgagtgtcagacatggtggcatttatgtgaaagctgttattccccagggagcagcagagtctgatggtagaattcacaaaggtgatcgcgtcctagctgtcaatggagttagtctagaaggagccacccataagcaagctgtggaaacactgagaaatacaggacaggtggttcatctgttattagaaaagggacaatctccaacatctaaagaacatgtcccggtaaccccacagtgtaccctttcagatcagaatgcccaaggtcaaggcccagaaaaagtgaagaaaacaactcaggtcaaagactacagctttgtcactgaagaaaatacatttgaggtaaaattatttaaaaatagctcaggtctaggattcagtttttctcgagaagataatcttataccggagcaaattaatgccagcatagtaagggttaaaaagctctttcctggacagccagcagcagaaagtggaaaaattgatgtaggagatgttatcttgaaagtgaatggagcctctttgaaaggactatctcagcaggaagtcatatctgctctcaggggaactgctccagaagtattcttgcttctctgcagacctccacctggtgtgctaccggaaattgatactgcgcttttgaccccacttcagtctccagcacaagtacttccaaacagcagtaaagactcttctcagccatcatgtgtggagcaaagcaccagctcagatgaaaatgaaatgtcagacaaaagcaaaaaacagtgcaagtccccatccagaaaagacagttacagtgacagcagtgggagtggagaagatgacttagtgacagctccagcaaacatatcaaattcgacctggagttcagctttgcatcagactctaagcaacatggtatcacaggcacagagtcatcatgaagcaccaagagtcaagaagataccatttgtaccatgttttactatcctcaggaaaaggcccaataaaccagagtttgaggacagtaatccttcccctctaccaccggatatggctcctgggcagagttatcaaccccaatcagaatctgcttcctctagttcgatggataagtatcatatacatcacatttctgaaccaactagacaagaaaactggacacctttgaaaaatgacttggaaaatcaccttgaagactttgaactggaagtagaactcctcattaccctaattaaatcagaaaaaggaagcctgggttttacagtaaccaaaggcaatcagagaattggttgttatgttcatgatgtcatacaggatccagccaaaagtgatggaaggctaaaacctggggaccggctcataaaggttaatgatacagatgttactaatatgactcatacagatgcagttaatctgctccggggatccaaaacagtcagattagttattggacgagttctagaattacccagaataccaatgttgcctcatttgctaccggacataacactaacgtgcaacaaagaggagttgggtttttccttatgtggaggtcatgacagcctttatcaagtggtatatattagtgatattaatccaaggtccgtcgcagccattgagggtaatctccagctattagatgtcatccattatgtgaacggagtcagcacacaaggaatgaccttggaggaagttaacagagcattagacatgtcacttccttcattggtattgaaagcaacaagaaatgatcttccagtggtccccagctcaaagaggtctgctgtttcagctccaaagtcaaccaaaggcaatggttcctacagtgtggggtcttgcagccagcctgccctcactcctaatgattcattctccacggttgctggggaagaaataaatgaaatatcgtaccccaaaggaaaatgttctacttatcagataaagggatcaccaaacttgactctgcccaaagaatcttatatacaagaagatgacatttatgatgattcccaagaagctgaagttatccagtctctgctggatgttgtggatgaggagtcccagaatcttttaaacgaaaataatgcagcaggatactcctgtggtccaggtacattaaagatgaatgggaagttatcagaagagagaacagaagatacagactgcgatggttcacctttacctgagtattttactgaggccaccaaaatgaatggctgtgaagaatattgtgaagaaaaagtaaaaagtgaaagcttaattcagaagccacaagaaaagaagactgatgatgatgaaataacatggggaaatgatgagttgccaatagagagaacaaaccatgaagattctgataaagatcattcctttctgacaaacgatgagctcgctgtactccctgtcgtcaaagtgcttccctctggtaaatacacgggcgccaacttaaaatcagtcattcgagtcctgcgggttgctagatcaggaattccttctaaggagctggagaatcttcaagaattaaaacctttggatcagtgtctaattgggcaaactaaggaaaacagaaggaagaacagatataaaaatatacttccctatgatgctacaagagtgcctcttggagatgaaggtggctatatcaatgccagcttcattaagataccagttgggaaagaagagttcgtttacattgcctgccaaggaccactgcctacaactgttggagacttctggcagatgatttgggagcaaaaatccacagtgatagccatgatgactcaagaagtagaaggagaaaaaatcaaatgccagcgctattggcccaacatcctaggcaaaacaacaatggtcagcaacagacttcgactggctcttgtgagaatgcagcagctgaagggctttgtggtgagggcaatgacccttgaagatattcagaccagagaggtgcgccatatttctcatctgaatttcactgcctggccagaccatgatacaccttctcaaccagatgatctgcttacttttatctcctacatgagacacatccacagatcaggcccaatcattacgcactgcagtgctggcattggacgttcagggaccctgatttgcatagatgtggttctgggattaatcagtcaggatcttgattttgacatctctgatttggtgcgctgcatgagactacaaagacacggaatggttcagacagaggatcaatatattttctgctatcaagtcatcctttatgtcctgacacgtcttcaagcagaagaagagcaaaaacagcagcctcagcttctgaagtgacatgaaaagagcctctggatgcatttccatttctctccttaacctccagcagactcctgctctctatccaaaataaagatcacagagcagcaagttcatacaacatgcatgttctcctctatcttagaggggtattcttcttgaaaataaaaaatattgaaatgctgtatttttacagctactttaacctatgataattatttacaaaattttaacactaaccaaacaatgcagatcttagggatgattaaaggcagcatttgatgatagcagacattgttacaaggacatggtgagtctatttttaatgcaccaatcttgtttatagcaaaaatgttttccaatattttaataaagtagttatttataggcatacttgaaaccagtatttaagctttaaatgacagtaatattggcatagaaaaaagtagcaaatgtttactgtatcaatttctaatgtttactatatagaatttcctgtaatatatttatatactttttcatgaaaatggagttatcagttatctgtttgttactgcatcatctgtttgtaatcattatctcactttgtaaataaaaacacaccttaaaacatgaacaagccaaaaaaaaaaaaaaa

SEQ ID NO: 963 - DNA, 1037 bp; single-stranded, linear
  immediate source library: GENBANK
  immediate source clone: g1488065
gccacgtgctgctgggtctcagtcctccacttcccgtgtcctctggaagttgtcaggagcaatgttgcgcttgtacgtgttggtaatgggagtttctgccttcacccttcagcctgcggcacacacaggggctgccagaagctgccggtttcgtgggaggcattacaagcgggagttcaggctggaaggggagcctgtagccctgaggtgcccccaggtgccctactggttgtgggcctctgtcagcccccgcatcaacctgacatggcataaaaatgactctgctaggacggtcccaggagaagaagagacacggatgtgggcccaggacggtgctctgtggcttctgccagccttgcaggaggactctggcacctacgtctgcactactagaaatgcttcttactgtgacaaaatgtccattgagctcagagtttttgagaatacagatgctttcctgccgttcatctcatacccgcaaattttaaccttgtcaacctctggggtattagtatgccctgacctgagtgaattcacccgtgacaaaactgacgtgaagattcaatggtacaaggattctcttcttttggataaagacaatgagaaatttctaagtgtgagggggaccactcacttactcgtacacgatgtggccctggaagatgctggctattaccgctgtgtcctgacatttgcccatgaaggccagcaatacaacatcactaggagtattgagctacgcatcaagaaaaaaaaagaagagaccattcctgtgatcatttcccccctcaagaccatatcagcttctctggggtcaagactgacaatcccgtgtaaggtgtttctgggaaccggcacacccttaaccaccatgctgtggtggacggccaatgacacccacatagagagcgcctacccgggaggccgcgtgaccgaggggccacgccagtaagtgggccagggtcttctgttgagaactctgtgggtttcgctcttccttttggagacagttatcactatgacccacataccacatg

SEQ ID NO: 964 - DNA, 724 bp; single-stranded, linear
  immediate source library: GENBANK
  immediate source clone: g1491709
atgccgagcaagaagaagaagtacaacgcgcggttcccgccggcgcggatcaagaagatcatgcagacggacgaagagattgggaaggtggcggcggcggtgcctgtcatcatctcccgggcgctcgagctcttcctagagtcgctgttgaagaaggcctgccaggtgacccagtcgcggaacgcgaagaccatgaccacatcccacctgaagcagtgcatcgagctggagcagcagtttgacttcttgaaggacctggtggcatctgttcccgacatgcagggggacggggaagacaaccacatggatggggacaagggcgcccgcaggggccggaagccaggcagcggcggccggaagaacggtgggatgggaacgaaaagcaaggacaagaagctgtccgggacagactcggagcaggaggatgaatctgaggacacagatactgatggggaagaggagacatcacaacccccaccccaggccagccacccctctgcccactttcagagccccccgacacccttcctgcccttcgcctctactctgcctttgcccccagcgcccccgggcccctcagcacctgatgaagaggacgaagaagattacgactcctagcgccttctgccccccagaccatagccccttttagttggttttagttgctctggggggaggagagaaggtagagctgttcttaaatttattaaaaaaaaaaaaaaaa

SEQ ID NO: 965 - DNA, 643 bp; single-stranded, linear
  immediate source library: GENBANK
  immediate source clone: g1495461
ggatttaccgtggctttgagtaatgagaatttcgaaaccacatttgagaagtatttccatccagtgctacttgtgtttacttctaaacagtcattttctaactgaagctggcattcatgtcttcattttgggatgcagctaatatacccagttggcccaaagcacctaacctatagttatataatctgactctcagttcagttttactctactaatgccttcatggtattgggaaccatagatttgtgcagctgtttcagtgcagggcttcctaaaacagaagccaactgggtgaatgtaataagtgatttgaaaaaaattgaagatcttattcaatctatgcatattgatgctactttatatacggaaagtgatgttcaccccagttgcaaagtaacagcaatgaagtgctttctcttggagttacaagttatttcacttgagtccggagatgcaagtattcatgatacagtagaaaatctgatcatcctagcaaacaacagtttgtcttctaatgggaatgtaacagaatctggatgcaaagaatgtgaggaactggaggaaaaaaatattaaagaatttttgcagagttttgtacatattgtccaaatgttcatcaacacttcttgattgcaattgattc

SEQ ID NO: 966 - DNA, 5581 bp; single-stranded, linear
  immediate source library: GENBANK
  immediate source clone: g1502342
aattccgggcgccagtcccgctccgcgccgcgccgctccgctccggctcgggctccggctcgcctcgggctgggctcgggctccgggggcggcgtccccgcgccgggccccgggacgcggcgacctccaaccatggcccgtgcccaggcgctcgtgctggcactcaccttccagctctgcgcgccggagaccgagactccggcagctggctgcaccttcgaggaggcaagtgacccagcagtgccctgcgagtacagccaggcccagtacgatgacttccagtgggagcaagtgcgaatccaccctggcacccgggcacctgcggacctgccccacggctcctacttgatggtcaacacttcccagcatgccccaggccagcgagcccatgtcatcttccagagcctgagcgagaatgatacccactgtgtgcagttcagctacttcctgtacagccgggacggcacaggcggcaccctgggcgtctacgtgcgcgttaatgggggccccctggcgagtgctgtgtggaatatgactggatcccacggccgtcagtggcaccaggctgagctggctgtcagcactttctggcccaatgaatatcaggtgctgtttgaggccctcatctccccagaccgcaggggctacatgggcctagatgacatcctgcttctcagctacccctgcgcaaaggccccacacttctcccgcctgggcgacgtggaggtcaacgcgggccagaacgcgtcgttccagtgcatggccgcgggagagcccatgcgccaacgcttcctcttgcaacggcagagcggggccctggtgccggcgggggcgttcggcacatcagccaccggcttcctggccactttcccgctggctgccgtgagccgcgccgagcaggacctgtaccgctgtgtgtcccaggccccgcgcggcggcgtctctaacttcgcggagctcatcgtcaaggagcccccaactcccatcgcgcccccacagctgctgcgtgctggccccacctacctcatcatccagctcaacaccaactccatcattggcgacgggccgatcgtgcgcaaggagattgagtaccgcatggcgcgcgggccctgggctgaggtgcacgccgtcagcctgcagacctacaagctgtggcacctcgaccccgacacagagtatgagatcagcgtgctgctcacgcgtcccggagacggcggcactggccgctgggccacccctcatcagccgcaccaaatgcgcagagcccatgagggccccaaaggcctggcttttgctgagatccaggcccgtcagctgaccctgcagtgggaaccactgggctacaacgtgacgcgttgccacacctatactgtgtcgctgtgctatcactacaccctgggcagcagccacaaccagaccatccgagagtgtgtgaagacagagcaaggtgtcagccgctacaccatcaagaacctgctgccctatcggaacgttcacgtgaggcttgtcctcactaaccctgaggggcgcaaagagggcaaggaggtcactttccagacggatgaggatgtgcccagtgggattgcagccgagtccctgaccttcactccactggaggacatgatcttcctcaagtgggaggagccccaggagcccaatggtctcatcacccagtatgagatcagctaccagagcatcgagtcatcagacccggcagtgaacgtgccaggcccacgacgtaccatctccaagctccgcaatgagacctaccatgtcttctccaacctgcacccaggcaccacctacctgttctccgtgcgggcccgcacaggcaaaggcttcggccaggcggcactcactgagataaccactaacatctctgctcccagctttgattatgccgacatgccgtcacccctgggcgagtctgagaacaccatcaccgtgctgctgaggccggcacagggccgcggtgcgcccatcagtgtgtaccaggtgattgtggaggaggagcgggcgcgaggctgcggcgggacgaggtggacaggactgcttcccagtgccattgaccttcgaggcggcgctggcccgaggctggtgcactacttcggggccgaactggcggccagcagtctacctgaggccatgccctttaccgtgggtgacaaccagacctaccgaggcttctggaacccaccacttgagcctaggaaggcctatctcatctacttccaggcagcaagccacctgaagggggagacccggctgaattgcatccgcattgccaggaaagctgcctgcaaggaaagcaagcggcccctggaggtgtcccagagatcggaggagatggggcttatcctgggcatctgtgcaggggggcttgctgtcctcatccttctcctgggtgccatcattgtcatcatccgcaaagggaagccggtgaacatgaccaaggccaccgtcaactaccgccaggagaagacacacatgatgagcgccgtggaccgcagcttcacagaccagagcaccctgcaggaggacgagcggctgggcctgtccttcatggacacccatggctacagcacccggggagaccagcgcagcggtggggtcactgaggccagcagcctcctggggggctccccgaggcgtccctgtggccggaagggctccccataccacacggggcagctgcaccctgcggtgcgtgtcgcagaccttctgcagcacatcaaccagatgaagacggccgagggttacggcttcaagcaggagtatgagagcttctttgaaggctgggacgccacaaagaagaaagacaaggtcaagggcagccggcaggagccaatgcctgcctatgatcggcaccgagtgaaactgcacccgatgctgggagaccccaatgccgactacattaatgccaactacatagatggttaccacaggtcaaaccacttcatagccactcaagggccgaagcctgagatggtctatgacttctggcgtatggtgtggcaggagcactgttccagcatcgtcatgatcaccaagctggtcgaggtgggcagggtgaaatgctcacggtactggccggaggactcagacacctacggggacatcaagattatgctggtgaagacagagaccctggctgagtatgtcgtgcgcacttttgccctggagcggagaggctactctgcccggcacgaggtccgccagtcccacttcacagcgtggccagagcatggcgtcccctaccatgccacggggctgctggctttcatccggcgggtgaaggcctccaccccacctgatgccgggcccattgtcatccactgcagcgcgggcaccggccgcacaggttgctatatcgtcctggatgtgatgctggacatggcagagtgtgagggcgtcgtggacatttacaactgtgtgaagactctctgctcccggcgtgtcaacatgatccagactgaggagcagtacatcttcattcatgatgcaatcctggaggcctgcctgtgtggggagaccaccatccctgtcagtgagttcaaggccacctacaaggagatgatccgcattgatcctcagagtaattcctcccagctgcgggaagagttccagacgctgaactcggtcaccccgccgctggacgtggaggagtgcagcatcgccctgttgccccggaaccgcgacaagaaccgcagcatggacgtcctgccgcccgaccgctgcctgcccttcctcatctccactgatggggactccaacaactacattaatgcagccctgactgacagctacacacggaggtcggccttcatggtgaccctgcacccgctgcagagcaccacgcccgacttctggcggctggtctacgattacgggtgcacctccatcgtcatgctcaaccagctgaaccagtccaactccgcctggccctgcctgcagtactggccagagccaggccggcagcaatatggcctcatggaggtggagtttatgtcgggcacagctgatgaagacttagtggctcgagtcttccgggtgcagaacatctctcggttgcaggagggagacctgctggtgcggcacttccagttcctgcgctggtctgcataccgggacacacctgactccaagaaggccttcttgcacctgctggctgaggtggacaagtggcaggccgagagtggggatgggcgcaccatcgtgcactgcctaaacgggggaggacgcagcggcaccttctgcgcctgcgccacggtcctggagatgatccgctgccacaacttggtggacgttttctttgctgcccaaaccctccggaactacaaacccaacatggtggagaccatggatcagtaccacttttgctacgatgtggccctggagtacttggaggggctggagtcaagatagcggggccctggcctggggcacccactgcacactcagggccagacccaccatcctggactggcgaggaagatcagtgcctcctgctctgcccaaacacactcccatggggcaagcactggagtggatgctgggctatcttgctcccccttccactgtgggcagggcctttcgcttgtcccatgggcgggtggtgggccaaggaggagcttagcaagtctgcagcccagccccacctccatagggtcctgcaggcctgtgctgagaggcctggtgctgcctggcagagtgacaaaggctcaggacggctggctctgggggactcaggccaagccccttggcaccatcctggcttttggcagggatgagtgaggccctgcagagagcatcccaggccaaggttcccactcagcctgccccctctgcatgtgggtagaggatgtactgggacttggcatttaggattccatctggcccagcccctgaaggtcctggggaagcaggtctcaattctgatagccagtggggcacactgactgtcctccccaggggaactgcagcgccctcctccccactgccccctgcagcccctgagatattttgctcactatccctccccacttgcttccctgatatgtgctctgacttccctgaaccaggatctgcctattactgctgtcccatggggggctccttccctgcctgacccactgttgcagaatgaagtcacctcgcccccctcttcctttaatcttcaggcctcactggcctgtcctgctcagcttgggccagtgacaatctgcaaggctgaacaacagcccctggggttgaggcccctgtggctcctggtcaggctgcccgttgtggggaggggcagtgttagagcagggctggtcataccctctggagttcagagcaagaggtaggaccagtgcttttttgtttcttttgttatttttggttgggtgggtgggaaggtctctttaaaatggggcaggccacacccccattccgtgcctcaatttccccatctgtaaactgtagatatgactactgacctacctcgcagggggctgtggggaggcataagctgatgtttgtaaagcgctttgtaaataaacgtgctctctgaatgccaaaaaaaaaaaaacaaaaaaaa

SEQ ID NO: 967 - DNA, 1225 bp; single-stranded, linear
  immediate source library: GENBANK
  immediate source clone: g1502408
aagaaactctccccgggtggaacaagatggattatcaagtgtcaagtccaatctatgacatcaattattatacatcggagccctgccaaaaaatcaatgtgaagcaaatcgcagcccgcctcctgcctccgctctactcactggtgttcatctttggttttgtgggcaacatgctggtcatcctcatcctgataaactgcaaaaggctgaagagcatgactgacatctacctgctcaacctggccatctctgacctgtttttccttcttactgtccccttctgggctcactatgctgccgcccagtgggactttggaaatacaatgtgtcaactcttgacagggctctattttataggcttcttctctggaatcttcttcatcatcctcctgacaatcgataggtacctggctgtcgtccatgctgtgtttgctttaaaagccaggacggtcacctttggggtggtgacaagtgtgatcacttgggtggtggctgtgtttgcgtctctcccaggaatcatctttaccagatctcaaaaagaaggtcttcattacacctgcagctctcattttccatacagtcagtatcaattctggaagaatttccagacattaaagatagtcatcttggggctggtcctgccgctgcttgtcatggtcatctgctactcgggaatcctaaaaactctgcttcggtgtcgaaatgagaagaagaggcacagggctgtgaggcttatcttcaccatcatgattgtttattttctcttctgggctccctacaacattgtccttctcctgaacaccttccaggaattctttggcctgaataattgcagtagctctaacaggttggaccaagctatgcaggtgacagagactcttgggatgacgcactgctgcatcaaccccatcatctatgcctttgtcggggagaagttcagaaactacctcttagtcttcttccaaaagcacattgccaaacgcttctgcaaatgctgttctattttccagcaagaggctcccgagcgagcaagctcagtttacacccgatccactggggagcaggaaatatctgtgggcttgtgacacggactcaagtgggctggtgacccagtcagagttgtgcacatggcttagttttcatacacagcctgggctgggggtggggtgggagaggtcttttttaaaaggaagttactgttatagagggtctaagattcatccat

SEQ ID NO: 968 - DNA, 3614 bp; single-stranded, linear
  immediate source library: GENBANK
  immediate source clone: g1503985
ctgaggaagtgggacctccccttttgggtcggtagttcagcgccggcgccggtgtgcgagccgcggcagagtgaggcaggcaacccgaggtgcggagcgacctgcggaggctgagccccgctttctcccagggtttcttatcagccagccgccgctgtccccgggggagtaggaggctcctgacaggccgcggctgtctgtgtgtccttctgagtgtcagaggaacggccagaccccgcgggccggagcagaacgcggccagggcagaaagcggcggcaggagaagcaggcagggggccggaggacgcagaccgagacccgaggcggaggcggaccgcgagccggccatgtcggtggtggggttggacgtgggctcgcagagctgctacatcgcggtagcccgggccgggggcatcgagaccatcgccaatgagttcagcgaccggtgcaccccgtcagtcatatcatttggatcaaaaaatagaacaatcggagttgcagccaaaaatcagcaaatcactcatgcaaacaatacggtgtctaacttcaaaagatttcatggccgagcattcaatgaccccttcattcaaaaggagaaggaaaacttgagttacgatttggttccattgaaaaatggtggagttggaataaaggtaatgtacatgggtgaagaacatctatttagtgtggagcagataacagccatgttgttgactaagctgaaggaaactgctgaaaacagcctcaagaaaccagtaacagattgtgttatttcagtcccctccttctttacagatgctgagaggcgatctgtgttagatgctgcacagattgttggcctaaactgtttaagacttatgaatgacatgacagctgttgctttgaattacggaatttataagcaggatctcccaagcctggatgagaaacctcggatagtggtttttgttgatatgggacattcagcttttcaagtgtctgcttgtgcttttaacaagggaaaattgaaggtactgggaacagcttttgatcctttcttaggaggaaaaaacttcgatgaaaagttagtggaacatttttgtgcagaatttaaaactaagtacaagttggatgcaaaatccaaaatacgagcactcctacgtctgtatcaggaatgtgaaaaactgaaaaagctaatgagctctaacagcacagaccttccactgaatatcgaatgctttatgaatgataaagatgtttccggaaagatgaacaggtcacaatttgaagaactctgtgctgaacttctgcaaaagatagaagtacccctttattcactgttggaacaaactcatctcaaagtagaagatgtgagtgcagttgagattgttggaggcgctacacgaattccagctgtgaaggaaagaattgccaaattctttggaaaagatattagcacaacactcaatgcagatgaagcagtagccagaggatgtgcattacagtgtgcaatactttccccggcatttaaagttagagaattttccgtcacagatgcagttccttttccaatatctctgatctggaaccatgattcagaagatactgaaggtgttcatgaagtctttagtcgaaaccatgctgctcctttctccaaagttctcacctttctgagaagggggccttttgagctagaagctttctattctgatccccaaggagttccatatccagaagcaaaaataggccgctttgtagttcagaatgtttctgcacagaaagatggagaaaaatctagagtaaaagtcaaagtgcgagtcaacacccatggcattttcaccatctctacggcatctatggtggagaaagtcccaactgaggagaatgaaatgtcttctgaagctgacatggagtgtctgaatcagagaccaccagaaaacccagacactgataaaaatgtccagcaagacaacagtgaagctggaacacagccccaggtacaaactgatgctcaacaaacctcacagtctcccccttcacctgaacttacctcagaagaaaacaaaatcccagatgctgacaaagcaaatgaaaaaaaagttgaccagcctccagaagctaaaaagcccaaaataaaggtggtgaatgttgagctgcctattgaagccaacttggtctggcagttagggaaagaccttcttaacatgtatattgagacagagggtaagatgataatgcaagataaattggaaaaagaaaggaatgatgctaaaaatgcagttgaggaatatgtgtatgagttcagagacaagctgtgtggaccatatgaaaaatttatatgtgagcaggatcatcaaaattttttgagactcctcacagaaactgaagactggctgtatgaagaaggagaggaccaagctaaacaagcatatgttgacaagttggaagaattaatgaaaattggcactccagttaaagttcggtttcaggaagctgaagaacggccaaaaatgtttgaagaactaggacagaggctgcagcattatgccaagatagcagctgacttcagaaataaggatgagaaatacaaccatattgatgagtctgaaatgaaaaaagtggagaagtctgttaatgaagtgatggaatggatgaataatgtcatgaatgctcaggctaaaaagagtcttgatcaggatccagttgtacgtgctcaggaaattaaaacaaaaatcaaggaattgaacaacacatgtgaacccgttgtaacacaaccgaaaccaaaaattgaatcacccaaactggaaagaactccaaatggcccaaatattgataaaaaggaagaagatttagaagacaaaaacaattttggtgctgaacctccacatcagaatggtgaatgttaccctaatgagaaaaattctgttaatatggacttggactagataaccttaaattggcctattccttcaattaataaaatatttttgccatagtatgtgactctacataacatactgaaactatttatattttcttttttaaggatatttagaaattttgtgtattatatggaaaaagaaaaaaagcttaagtctgtagtctttatgatcctaaaagggaaaattgccttggtaactttcagattcctgtggaattgtgaattcatactaagctttctgtgcagtctcaccatttgcatcactgaggatgaaactgacttttgtcttttggagaaaaaaaactgtactgcttgttcaagagggctgtgattaaaatctttaagcatttgttcctgccaaggtagttttcttgcattttgctctccattcagcatgtgtgtgggtgtggatgtttataaacaagactaagtctgacttcataagggctttctaaaaccatttctgtccaagagaaaatgactttttgctttgatattaaaaattcaatgagtaaaacaaaagctagtcaaatgtgttagcagcatgcagaacaaaaactttaaactttctctctcactatacagtatattgtcatgtgaaagtgtggaatggaagaaatgtcgatcctgttgtaactgattgtgaacacttttatgagctttaaaataaagttcatcttatggtgtcatttct

SEQ ID NO: 969 - DNA, 4121 bp; single-stranded, linear
  immediate source library: GENBANK
  immediate source clone: g1504025
acaatgtggtcccgaagcggccagcgccgggagctgcagcgctgagacccccagcccgccccctcgggctcccggccggggccccatcatgttctccaggaagaaacgagagctcatgaaaaccccttccatctcgaaaaagaaccgcgcgggaagccccagcccgcagccctcgggggagctgcccaggaaggatggggctgacgcggtgttccccggaccaagcctggagccgcccgctgggtcctccggcgtcaaggccacagggaccctcaagcggcccaccagcctgagccgccacgccagcgcggctggcttccccctgtcgggtgctgcctcctggacactgggccggagccaccggagcccactgacagccgccagcccgggcgagctgcccaccgagggtgccggcccggacgtcgtcgaggacatctcccatctgctggcggacgtggcccgcttcgctgagggccttgagaaacttaaggagtgtgtgttgcgtgacgacctccttgaggcccgccgcccgcgggcccacgagtgcctgggtgaggctctgcgtgtcatgcatcagatcatctccaagtacccgctgctgaacaccgtggagacgctcaccgcagccggcaccctcattgccaaggtcaaagccttccattatgagagcaacaatgatctggagaaacaggagttcgagaaggccctggagacgattgctgtggccttcagtagcacagtgtccgagttcctcatgggtgaagtggacagcagcaccctcctagcagtgcctcctggggactcgagccagtccatggaaagcctgtatggaccgggcagtgagggcacgcctcccagcctggaagactgtgacgccggctgcctgcccgccgaggaggtggacgtgctgctacagcgctgtgaggggggcgtggatgccgcactgctgtatgccaagaacatggccaagtacatgaaggacctcatcagctacctggagaagcggacgacgctggagatggagtttgccaagggcctgcagaagatcgctcacaactgcagacagagcgtcatgcaggagccccacatgccgctcctgtccatctactcgctggccctggagcaggacctggagttcggccacagcatggtgcaggcggtgggcaccttgcagacccagaccttcatgcagcccctgaccctgcggcggcttgaacacgagaagcgcaggaaggagatcaaggaggcctggcaccgtgcccagaggaagctgcaagaggcggagtccaacctgcgcaaggccaagcagggttacgtgcagcgctgcgaggaccacgacaaggctcgcttcctcgtggccaaggcggaggaggagcaggctggcagcgcgccgggagcaggcagcacggccaccaagaccctggacaagcggcggcggctggaggaggaggccaagaacaaggcggaggaagctatggccacctaccgcacctgcgtggccgacgcgaagacgcagaagcaggagctggaggataccaaggtgacggcgctgcggcagatccaggaggtcatccggcagagcgaccaaaccatcaagtcggccacgatctcctactaccagatgatgcatatgcagacggcgccgctgcccgtgcacttccagatgctgtgtgagagcagcaagctgtatgacccaggccagcagtacgcctcccacgtgcgccagctgcagcgggaccaggagcccgatgtgcactacgactttgagccccacgtctccgccaacgcctggtcccccgtcatgcgtgcccggaagagcagcttcaacgtgagtgatgtggcgcggccggaggctgccgggagccccccagaagaaggcgggtgcactgagggcacacctgccaaggaccacagggccgggcgaggacaccaggttcacaagtcatggccgctctcgatctcagactcggacagtgggctggaccccggccctggcgcaggggactttaagaagttcgagcggacgtcatccagtggtaccatgtcgtccacggaggagctggtggacccagacggtggagccggggcttcagcctttgagcaggctgacctcaacggcatgacccccgagctgccggtggccgtgcccagtggaccgttccgccacgaggggctgtccaaggcggcccgtactcaccggctccggaagctccgcacgcccgccaagtgccgcgagtgcaacagctacgtctacttccagggtgctgagtgtgaagagtgctgcctggcctgccacaagaaatgtctggagacgctggccatacagtgcgggcacaagaagctgcaaggccgcctgcagctgttcggccaggacttcagccacgcggcccgcagcgcccccgacggcgtgcccttcatcgtcaagaagtgcgtctgcgagatcgagcggcgggcgctgcgcaccaagggcatctaccgggtcaatggggtaaagacacgcgtggagaagctgtgccaggccttcgagaacggcaaggagctggtcgagctgtcgcaggcctcgccccacgacatcagcaacgtcctcaagctctacctgcgtcagcttcccgagccgctcatctccttccgcctctaccacgagctcgtagggctggccaaggacagcctgaaggcagaggccgaggccaaggcggcgtcccggggccggcaggacggctcggagagcgaggcagtggcggtggccctggcaggtcggctgcgggagctcctgcgggacctgccgcctgagaaccgggcctcgctgcagtacctgctgcgtcacctacgcaggatcgtggaggtggagcaggacaacaagatgacccccgggaacctgggcatcgtgttcgggcccacgctgcttcggccacggcccaccgaggccaccgtgtccctctcctccctggtggattatccccatcaggcccgcgtcatcgagactctcatcgtccactacggcctggtcttcgaggaggagccggaggagacccccgggggccaggacgagtcatccaaccagcgagctgaggtagtcgtccaggtgccgtacctggaggcgggcgaggcggtggtctacccgctgcaggaggcggcggcggacgggtgcagagaatcccgagttgtgtccaacgattcggactcggacctagaggaggcctccgagctgctgtcctcatcggaggccagtgccctgggccacctcagcttcctggagcagcagcagagcgaggccagcctagaggtggcttctggcagccacagcggcagtgaggagcagctggaggccacagcccgggaggacggggacggggacgaggacggcccggcccagcagctctcaggattcaacaccaaccagtccaacaacgtgctgcaggccccactgccccccatgaggctccgtggcgggcggatgacactgggctcctgcagggaaaggcagccggaattcgtgtgagctggggtggggctgggaccacaggtggcttctctcttgcctgctcctgtccctccagcacgtcccctgcaccacggcatagcttaggtgcgccgtcctggggtcgctgccgagagcgcctggacttcgacgtcccaccagcgggcgcctcctcccagaggcttccaggagcacgagggccttgcggcacaggactgtgccctgtgctgtcccctgcaccccggctcagctgagctggggaacactgctgtcgtgtgaagtcacagtggccttgttggtgcccacagggctgtgtggatggaggaagctgtccctgcccagtgcatcccccaggtcatcacggggacgcaggaggcaggccctgccctgccctctcctcacaggtctgttgcagggactccagaaaccattctgggagccgtggatgggggcggagctggggtttggtgcagtttccagggtgcagtacagcagggcctgaatactggccctggactcccttttccagaacaccaggtgtggccacctggggctcaggtacacagtggggtctctcggaagccaccgtgtggttctttcacaggcacgtttattttgctgaaataaaaagtttttaatcggg

SEQ ID NO: 970 - DNA, 1137 bp; single-stranded, linear
  immediate source library: GENBANK
  immediate source clone: g1515434
atgagcggggaatcaatgaatttcagcgatgttttcgactccagtgaagattattttgtgtcagtcaatacttcatattactcagttgattctgagatgttactgtgctccttgcaggaggtcaggcagttctccaggctatttgtaccgattgcctactccttgatctgtgtctttgccctcctggggaatattctggtggtgatcacctttgcttttaataagaaggccaggtctatgacagacgtctatctcgtgaacatggccattgcagacatcctctttgttcttactctcccattctgggcagtgagtcatgccactggtgcgtgggttttcagcaatgccacgtgcaagttgctaaaaggcatctatgccatcaactttaactgcgggatgctgctcctgacttgcattagcatggaccggtacatcgccattgtacaggcgactaagtcattccggctccgatccagaacactaccgcgcagcaaaatcatctgccttgttgtgtgggggctgtcagtcatcatctccagctcttcttttgtcttcaaccaaaaatacaacacccttggcagcgatgtctgtgaacccaagtaccagactgtctcggtgcccatcaggtggaagctgctgatgttggggcttgagctactctttggtttctttttccctttgatgttcatgatattttgttacacgttcattgtcaaaaccttggtgcaagctcagaattctaaaaggcacaaagccatccgtgtaatcatagctgtggtgcttgtgtttctggcttgtcagattcctcataacatggtcctgcttgtgacggctgcaaatttgggtaaaatgaaccgatcctgccagagcgaaaagctaattggctatacgaaaactgtcacagaagtcctggctttcctgcactgctgcctgaaccctgtgctctacgcttttattgggcagaagttcagaaactactttctgaagatcttgaaggacctgtggtgtgtgagaaggaagtacaagtcctcaggcttctcctgtgccgggaggtactcagaaaacatttctcggcagaccagtgagaccgcagataacgacaatgccgtcgtccttcactatgtgatagaaagctga

SEQ ID NO: 971 - DNA, 1367 bp; single-stranded, linear
  immediate source library: GENBANK
  immediate source clone: g1517891
gaattctgaactcatagtctccagccacacgtatgttaagcgaaactcctctgtgcccagcatgaaatcaaaagcaagtttttcctttttctttccacggtggtgaaggcggtcatcctcttgtagcctagggttccttggccaaattgctagttgccgatgacctcggggctcggcttgcgacgaacactgggctggaatctgtctccaggaaacccaggcccttttattgttgctgtgtcccccagaggcagggccaagctgaggccattctgtcatgctcaggaaggtagaagatggcccaaagggaagcacacctgcagtaggagggggggcagcggtgggcagggcacagcttccctgcaggttagaccccctcgcaggccagctgcctctcctgcagaaccgtgggtctcgggagaggctgccatccctgcacatgacaggtaggcacattgccgggttctggacatgcccccagagcagcctctgcccaccccttcctgggtccctgactccgtccccctccgtgtgcccctccccagatcacgcgctgccccatgatcccgtgctacatctcctccccggacgagtgcctctggatggactgggtcacagagaagaacatcaacgggcaccaggccaagttcttcgcctgcatcaagagaagtgacggctcctgtgcgtggtaccgcggcgcggcgccccccaagcaggagtttctcgacatcgaggacccataagcaggcctccaacgcccctgtggccaactgcaaaaaaagcctccaagggtttcgactggtccagctctgacatcccttcctggaaacagcatgaataaaacactcatcccatgggtccaaattaatatgattctgctccccccttctccttttagacatggttgtgggtctggagggagacgtgggtccaaggtcctcatcccatcctccctctgccaggcactatgtgtctggggcttcgatccttgggtgcaggcagggctgggacacgcggcttccctcccagtccctgccttggcaccgtcacagatgccaagcaggcagcacttagggatctcccagctgggttagggcagggcctgagaaatgtgcattttgcagaaacttttgagggtcgttgcaagactgtgtagaggcctacaggtccctttcatcttgagagggacatggcccttgttttctgcagcttccacgcctctgcactccctgcccctggaagtgctcccatcgcccggtgcccaccatgagctcccagcacctgactccccccacatggaagggcagcctggaaccagtggctagttcttgaattagccccatcaatcctattaatcctcagaattc

SEQ ID NO: 972 - DNA, 1168 bp; single-stranded, linear
  immediate source library: GENBANK
  immediate source clone: g1517900
ctgtgactggtgctggagttttgagtccacagataaaatgtgtctccttcgtctctactagagaggaaaaagaactggaattggaagaacagggagactgaagggtagcaagagaggctggagaagagagtgaaaagaccgcttacctgatttgaaattgtctgcagcccctctttcctggagtaaatgaactggaccaaatctcaaaaatccacgatgtcatcggcacacccgctcagaagatcctcaccaagttcaaacagtcgagagctatgaattttgattttccttttaaaaagggatcaggaatacctctactaacaaccaatttgtccccacaatgcctctccctcctgcacgcaatggtggcctatgatcccgatgagagaatcgccgcccaccaggccctgcagcacccctacttccaagaacagagaaacagtccctaaagcaagaggaggaccgtcccaagagacgaggaccggcctatgtcatggaactgcccaaactaaagctttcgggagtggtcagactgtcgtcttactccagccccacgctgcagtccgtgcttggatctggaacaaatggaagagtgccggtgctgagacccttgaagtgcatccctgcgagcaagaagacagatccgcagaaggaccttaagcctgccccgcagcagtgtcgcctgcccaccatagtgcggaaaggcggaagataactgagcagcaccgtcgtctcgacttcggaggcaacaccaagcccgaccgggccaggcctgggtgatctgctgctgagacgccacggagggctggggatgcgcctgcgtccgtttcgcgctggccggggctctgggtgctgccctgcgccctgccgcacccgcggcccgcgcagctgcctaggatgttctgggctaatatacttgtaaaaccaccgcattctagggttttctttcattttcgttaagaatttggggcaggaaatactttgtaactttgtatatgaatcaaaacaaacgagcaggcatttctgtgatgtgttgggcgtggttggaaggtgggttctgcgtgtcccttcccagcgctgctggtcagtcgtggagcgccatcatgtcttaccagtgacgctgctgacacccctgacttttattaaagaataagctgtcgttaaaaaa

SEQ ID NO: 973 - DNA, 2088 bp; single-stranded, linear
  immediate source library: GENBANK
  immediate source clone: g1518017
gtttgagcagcattgttagagcctgtggaaaacactttacaactgtgtaactgtcttcatctttacagaggaatagtctacaaaggaagacttgtaacctggagaagagacctgtcatttactccatcctttatagtgatgctacaggacgaagaggaatggataaaaacattggcgagcaactcaataaagcgtatgaagccttccggcaggcatgcatggatagagattctgcagtaaaagaattacagcaaaagactgagaactatgagcagagaatacgtgaacaacaggaacagctgtcactccaacagactattattgacaagctaaaatctcagttacttcttgtgaattccactcaagataacaattatggctgtgtccctctgcttgaagacagtgacacaagaaagaatactttgactcttgctcagccacaagataaagtgatttcaggaatagcaagagaaaaactaccaaaggtaagaagacaagaggtttcttctcctagaaaagaaacttcagcaaggagtcttggcagtcctttgctccatgaaaggggtaatatagagaagacttcctgggatctgaaagaagaatttcataaaatatgcatgctagcaaaagcacagaaagaccacttaagcaaacttaatataccagacactgcaactgaaacacagtgctctgtgcctatacagtgtacggataaaacagataaacaagaagcgctgtttacgcctcaggctaaagatgatataaatagaggtgcaccatccatcacatctgtcacaccaagaggactgtgcagagatgaggaagacacctctttggaatcactttctaaattcaatgtcaagtttccacctatggacaatgactcaactttcttacatagcactccagagagacccggcatccttagtcctgccacgtctgaggcagtgtgccaagagaaatttaatatggagttcagagacaacccagggaactttgttaaaacagaagaaactttatttgaaattcagggaattgaccccatagcttcagctatacaaaaccttaaaacaactgacaaaacaaagccctcaaatctcgtaaacacttgtatcaggacaactctggatagagctgcgtgtttgccacctggagaccataatgcattatatgtaaatagcttcccacttctggacccatctgatgcaccttttccctcactcgattccccgggaaaagcaatccgaggaccacagcagcccatttggaagccctttcctaatcaagacagtgactcggtggtactaagtggcacagactcagaactgcatatacctcgagtatgtgaattctgtcaagcagttttcccaccatccattacatccaggggggatttccttcggcatcttaattcacacttcaatggagagacttaagacacatttgaaaacagacatatcaagttctatgtgatgattttgggtttttaatactataaatacttgattgtaaactaaattcaagatcatttataggaaaatctagtttcacagctatttgaatttttttctggatttactatataactcttattttttaaaagatcattctgttctttcaaggagaaataagcctaaaagaagaaaaacaaaaaaaattctgtataaaactgtaatcctttgtattcatgtttacagtgctattactataattcaaaattatgtatgtgacttagagttatataatcataatttatgtttatttcaaatatctaagtttattgcttggatttctagtgagagctgttgaatttggtgatgtcaaatgtttctagggttttttagtttgtttttattgagaaaattgattatttatgctataggtgatattctctttgaataaacctataataggaaatagcagaccacataaacatctttgtaaatatcaaacctaatacatttcttgtccagtgataaaacaactggtagaattatttaaacactttagatttttaaataataaacatggctttaatttttactgtgtgtatagctacatgatgaaattaattaaatattaagaggt

SEQ ID NO: 974 - DNA, 2736 bp; single-stranded, linear
  immediate source library: GENBANK
  immediate source clone: g1524068
gaattcggcacgagagaaagcctgggacctgcagatgccatgtcaggcacgcttgctcctgcataggagactaaataatctcgatatataaggatggcagtctgttgtcttagatcagtttgagaagcagctctggcagcggggggtgtaggtgtgttgcactacactgaatggaataaggctaaaaatatgtttagtgtctgataagaacgccagttttctcaagctctcatttaacgtcggactttctgttttgcttttaaagaaaaatgttttacaagggcagcatgaagcggacaaaatctggagcaaagaaggattttatgctgttgtcatttttctcagcatctttgttattatagtaacgtgtttgatgattctttacagattaaaagaaagatttcagctttccttaagacaagacaaagagaaaaaccaggagatccacctatcgcccatcacattacagccagcactgtccgaggcaaagacagtccacagcatggtccaacctgagcaggccccaaaggtactgaatgttgtcgtggaccctcaaggccgaggtgctcctgagatcagagctaccaccgctacctctgtttgcccttctcctttcaaaatgaagcccataggacttcaagagagaagagggtccaacgtatctcttacattggacatgagtagcttggggaacattgaaccctttgtgtctataccaacaccacgggagaaggtagcaatggagtatctgcagtcagccagccgaattctcacaaggtctcagctgagggacgtcgtggcaagttcacatttactccaaagtgaattcatggaaataccaatgaactttgtggatcccaaagaaattgatattccgcgtcatggaactaaaaatcgctataagaccattttaccaaatcccctcagcagagtgtgtttaagaccaaaaaatgtaaccgattcattgagcacctacattaatgctaattatattaggggctacagtggcaaggagaaagccttcattgccacgcagggccccatgatcaacaccgtggatgatttctggcagatggtttggcaggaagacagccctgtgattgttatgatcacaaaactcaaagaaaaaaatgagaaatgtgtgctatactggccggaaaagagagggatatatggaaaagttgaggttctggttatcagtgtaaatgaatgtgataactacaccattcgaaaccttgtcttaaagcaaggaagccacacccaacatgtgaagcattactggtacacctcatggcctgatcacaagactccagacagtgcccagcccctcctacagctcatgctggatgtagaagaagacagacttgcttcccagggccgagggcctgtggttgtccactgcagtgcaggaataggtagaacagggtgttttattgctacatccattggctgtcaacagctgaaagaagaaggagttgtggatgcactaagcattgtctgccagcttcgtatggatagaggtggaatggtgcaaaccagtgagcagtatgaatttgtgcaccatgctctgtgcctgtatgagagcagacttcagcagagactgtccagtgagtcattgaagacttgtcagaccatcaatctcttggggtgattaatcaaattacccacccaaggcttctagaaggagcttcctgcaatggaaggaaggagaagctctgaagcccatgtatggcatggattgtggaagactgggcaacatatttaagatttccagctccttgtgtatatgaatgcatttgtaagcatcccccaaattattctgaaggttttttgatgatggaggtatgataggtttatcacacagcctaaggcagattttgttttgtctgtactgactctatctgccacacagaatgtatgtatgtaatattcagtaataaatgtcatcaggtgatgactggatgagctgctgaagacattcgtattatgtgttagatgctttaatgtttgcaaaatctgtcttgtgaatggactgtcagctgttaaactgttcctgttttgaagtgctattacctttctcagttaccagaatcttgctgctaaagttgcaagtgattgataatggatttttaacagagaagtctttgtttttgaaaaacaaaaatcaaaaacagtaactattttatatggaaatgtgtcttgataatattacctattaaatgtgtatttatagtccctcctatcaaacaattacagagcacaatgattgtcattgggtatatatgtatggaaagatttactctctattattgggcataaaggtggcttctgctccagaactctatccactgtatttccacatcgtgagtcattttactttaaaagggaaaaacaaatttgtagcaactctgaagtatcaagagtttaactacttgtctctcttttgctaagaagggatttttgatatgctatctacctggaatctctctctcaacaaaaggtatatgccttcaggaatgatataatctgtcccattttcgaggctccttataaggacatttccatgtatgtccttacatttctgaaagctttcaatcttcaagagacaaaaaaaattaaaataactacccttagcaaacactagctgttctgctcatatatgaatttttaatgcagcaatgttgactttgtttcatactgccaataaactcttaatactaaataaaaaaaaaaaaa

SEQ ID NO: 975 - DNA, 4553 bp; single-stranded, linear
  immediate source library: GENBANK
  immediate source clone: g1524091
ggcggcatggaggcggcgcatctgctcccggccgccgacgtgctgcgccacttctcggtgacagccgagggcggcctgagcccggcgcaggtgaccggcgcgcgggagcgctacggccccaacgagctcccgagtgaggaagggaagtccctgtgggagctggtgctggaacagtttgaggacctcctggtgcgcatcctgctgctggctgcccttgtctcctttgtcctggcctggttcgaggagggcgaggagaccacgaccgccttcgtggagcccctggtcatcatgctgatcctcgtggccaacgccattgtgggcgtgtggcaggaacgcaacgccgagagtgccatcgaggccctgaaggagtatgagcctgagatgggcaaggtgatccgctcggaccgcaagggcgtgcagaggatccgtgcccgggacatcgtcccaggggacattgtagaagtggcagtgggggacaaagtgcctgctgacctccgcctcatcgagatcaagtccaccacgctgcgagtggaccagtccatcctgacgggtgaatctgtgtccgtgaccaagcacacagaggccatcccagaccccagagctgtgaaccaggacaagaagaacatgctgttttctggcaccaatatcacatcgggcaaagcggtgggtgtggccgtggccaccggcctgcacacggagctgggcaagatccggagccagatggcggcagtcgagcccgagcggacgccgctgcagcgcaagctggacgagtttggacggcagctgtcccacgccatctctgtgatctgcgtggccgtgtgggtcatcaacatcggccacttcgccgacccggcccacggtggctcctggctgcgtggcgctgtctactacttcaagatcgccgtggccctggcggtggcggccatccccgagggcctcccggctgtcatcactacatgcctggcactgggcacgcggcgcatggcacgcaagaacgccatcgtgcgaagcctgccgtccgtggagaccctgggctgcacctcagtcatctgctccgacaagacgggcacgctcaccaccaatcagatgtctgtctgccggatgttcgtggtagccgaggccgatgcgggctcctgccttttgcacgagttcaccatctcgggtaccacgtatacccccgagggcgaagtgcggcagggggatcagcctgtgcgctgcggccagttcgacgggctggtggagctggcgaccatctgcgccctgtgcaacgactcggcgctggactacaacgaggccaagggtgtgtacgagaaggtgggagaggccacggagacagctctgacttgcctggtggagaagatgaatgtgttcgacaccgacctgcaggctctgtcccgggtggagcgagctggcgcctgtaacacggtcatcaagcagctgatgcggaaggagttcaccctggagttctcccgagaccggaaatccatgtccgtgtactgcacgcccacccgccctcaccctaccggccagggcagcaagatgtttgtgaagggggctcctgagagtgtgatcgagcgctgtagctcagtccgcgtggggagccgcacagcacccctgacccccacctccagggagcagatcctggcaaagatccgggattggggctcaggctcagacacgctgcgctgcctggcactggccacccgggacgcgcccccaaggaaggaggacatggagctggacgactgcagcaagtttgtgcagtacgagacggacctgaccttcgtgggctgcgtaggcatgctggacccgccgcgacctgaggtggctgcctgcatcacacgctgctaccaggcgggcatccgcgtggtcatgatcacgggggataacaaaggcactgccgtggccatctgccgcaggcttggcatctttggggacacggaagacgtggcgggcaaggcctacacgggccgcgagtttgatgacctcagccccgagcagcagcgccaggcctgccgcaccgcccgctgcttcgcccgcgtggagcccgcacacaagtcccgcatcgtggagaacctgcagtcctttaacgagatcactgctatgactggcgatggagtgaacgacgcaccagccctgaagaaagcagagatcggcatcgccatgggctcaggcacggccgtggccaagtcggcggcagagatggtgctgtcagatgacaactttgcctccatcgtggctgcggtggaggagggccgggccatctacagcaacatgaagcaattcatccgctacctcatctcctccaatgttggcgaggtcgtctgcatcttcctcacggcaattctgggcctgcccgaagccctgatccctgtgcagctgctctgggtgaacctggtgacagatggcctacctgccacggctctgggcttcaacccgccagacctggacatcatagagaagctgccccggagcccccgagaagccctcatcagtggctggctcttcttccgatacctggctatcggagtgtacgtaggcctggccacagtggctgccgccacctggtggtttgtgtatgacgccgagggacctcacatcaacttctaccagctgaggaacttcctgaagtgctccgaagacaacccgctctttgccggcatcgactgtgaggtgttcgagtcacgcttccccaccaccatggccttgtccgtgctcgtgaccattgaaatgtgcaatgccctcaacagcgtctcggagaaccagtcgctgctgcggatgccgccctggatgaacccctggctgctggtggctgtggccatgtccatggccctgcacttcctcatcctgctcgtgccgcccctgcctctcattttccaggtgaccccactgagcgggcgccagtgggtggtggtgctccagatatctctgcctgtcatcctgctggatgaggccctcaagtacctgtcccggaaccacatgcacgaagaaatgagccagaagtgagcgctgggaacagggtggagtctccggtgtgtacctcagactgatggtgcccatgtgttcgcctccgccccccacccttgccaccacactcgcccacttgcccaccgggtcccgccggataaatgacaggcccgaggtcagaatggccatccccgggccccgtcctggggtctctgtccccacttccttctggcctgggaggtctgtaattcctgtctcctggactctcctgggaagttccctgctctgcagctctggcccaggagctgcaggctgggagggggcagccaagaagccggagctggcagcatacccagagatccggggcccccccacccccaaatcacgagtgcagctggagcttgctcccccttgttcggaagctggacgttcacttggtgactggtgcctctgcactgacggaggactctgggggtccttcttaccggctctgacctctctcttcgtgcctggtctgggactgggtcagccctgggggatcagaaggggccatctgggcccagctgtgtacagcgagggtgggcagccccctccactccactctgcttccacaaagtcggctcccgagagctcgaggctgcttctgtttatatgtgcagggcccgggccggtgaagggtcagagagacggacacaaggagccggcaggagggcggagcgaggatgtcctttcccgggagacaagtcgggaaagcctggctggactgcctcagccccgcgcgcctcctggactcagggttccccgtcctgagctcgggagatgttcagagtcacactgccgcccggtctgccacgcagaggtccaacttgccacccgcgtccctggtacctgagaccaccgacatcctcaggttcctgaccgtggcgcccttctacccagcccagtgtgcggccgccgcgctgtctgcacagctgggggcctctgagcctggtgggcttcctggactcttggcctcactccttgccccctccccacgacacccatgagccgaaaggatgtcactaaggatggctgattccccaagggcacccgctctccctccctccctgctggaggaacacgtcatatcagatgagaggaagatggcctctgatggacagaatttttctcttaactcagcttttgctactttggcaaaaactagcgaggggtagcagaaacctgcaccaaggattgtccctatgtcttggcccctcctagagcgtgtgcagactgatgattttatatgtaaatcaagactcacatccctttcctagtcccccacatccaaagcccctcagcctgccttgcagaccaatgggctccatgttctgtagccccctcccctacgcctcacccctcctccctctcacaggttctgggcggccagtgagagaaacgcagtgggggaggcagggagtctggtgcctgcagagattctctgcttctttcctggggggaggtggggaggtcttagcaggagcgggccctgtacccacctgctgacctgctgtttggtagagaaataaaggttgtgtgactggggg

SEQ ID NO: 976 - DNA, 1560 bp; single-stranded, linear
  immediate source library: GENBANK
  immediate source clone: g1526425
gagacggcttctcatcatggcggaccctagagataaggcgcttcaggactaccgcaagaagttgcttgaacacaaggagatcgacggccgtcttaaggagttaagggaacaattaaaagaacttaccaagcagtatgaaaagtctgaaaatgatctgaaggccctacagagtgttgggcagatcgtgggtgaagtgcttaaacagttaactgaagaaaaattcattgttaaagctaccaatggaccaagatatgttgtgggttgtcgtcgacagcttgacaaaagtaagctgaagccaggaacaagagttgctttggatatgactacactaactatcatgagatatttgccgagagaggtggatccactggtttataacatgtctcatgaggaccctgggaatgtttcttattctgagattggagggctatcagaacagatccgggaattaagagaggtgatagaattacctcttacaaacccagagttatttcagcgtgtaggaataatacctccaaaaggctgtttgttatatggaccaccaggtacgggaaaaacactcttggcacgagccgttgctagccagctggactgcaatttcttaaaggttgtatctagttctattgtagacaagtacattggtgaaagtgctcgtttgatcagagaaatgtttaattatgctagagatcatcaaccatgcatcatttttatggatgaaatagatgctattggtggtcgtcggttttctgagggtacttcagctgacagagagattcagagaacgttaatggagttactgaatcaaatggatggatttgatactctgcatagagttaaaatgaccatggctacaaacagaccagatacactggatcctgctttgctgcgtccaggaagattagatagaaaaatacatattgatttgccaaatgaacaagcaagattagacatactgaaaatccatgcaggtcccattacaaagcatggtgaaatagattatgaagcaattgtgaagctttcggatggctttaatggagcagatctgagaaatgtttgtactgaagcaggtatgttcgcaattcgtgctgatcatgattttgtagtacaggaagacttcatgaaagcagtcagaaaagtggctgattctaagaagctggagtctaaattggactacaaacctgtgtaatttactgtaagatttttgatggctgcatgacagatgttggcttattgtaaaaataaagttaaagaaaataatgtatgtattggcaatgatgtcattaaaagtatatgaataaaaatatgagtaacatcataaaaattagtaattcaacttttaagatacagaagaaatttgtatgtttgttaaagttgcatttattgcagcaagttacaaagggaaagtgttgaagcttttcatatttgctgcgtgagcattttgtaaaatattgaaagtggtttgagatagtggtataagaaagcatttcttatgacttattttgtatcatttgttttcctcatctaaaaagttgaataaaatctgtttgattcagttctcct

SEQ ID NO: 977 - DNA, 1292 bp; single-stranded, linear
  immediate source library: GENBANK
  immediate source clone: g1549382
gaattcccaagagtctaggtaagagtttgttcccgtggtgcggagggtcaaggcccacacccggaaacctagcgaggtaaagttgcgtcttggttgtagagacgacaacttctccgcttcctcggcgatggcggcgtccgggagcggtatggcccagaaaacctgggaactggccaacaacatgcaggaagctcagagtatcgatgaaatctacaaatacgacaagaaacagcagcaagaaatcctggcggcgaagccctggactaaggatcaccattactttaagtactgcaaaatctcagcattggctctgctgaagatggtgatgcatgccagatcgggaggcaacttggaagtgatgggtctgatgctaggaaaggtggatggtgaaaccatgatcattatggacagttttgctttgcctgtggagggcactgaaacccgagtaaatgctcaggctgctgcatatgaatacatggctgcatacatagaaaatgcaaaacaggtgggccaccttgaaaatgcaatcgggtggtatcatagccaccctggctatggctgctggctttctgggattgatgttagtactcagatgctcaatcagcagttccaggaaccatttgtagcagtggtgattgatccaacaagaacaatatccgcagggaaagtgaatcttggcgcctttaggacatacccaaagggctacaaacctcctgatgaaggaccttctgagtaccagactattccacttaataaaatagaagattttggtgtacactgcaaacaatattatgccttagaagtctcatatttcaaatcctctttggatcgcaaattgcttgagctgttgtggaataaatactgggtgaatacgttgagttcttctagcttgcttactaatgcagactataccactggtcaggtctttgatttgtctgaaaagttagagcagtcagaagcccagctgggacgagggagtttcatgttgggtttagaaacgcatgaccgaaaatcagaagacaaacttgccaaagctacaagagacagctgtaaaactaccatagaagctatccatggattgatgtctcaggttattaaggataaactgtttaatcaaattaacatctcttaaacagtctctgagaagtactttacctgaaagacagtatgagaaaaatattcaagtacactttaaaaccagttacccaaaatctgattagaagtataaggtgctctgaagtgtcctaaatattaatatcctgtaataaagctctttaaaatgaaaaaaaaaa

SEQ ID NO: 978 - DNA, 807 bp; single-stranded, linear
  immediate source library: GENBANK
  immediate source clone: g1552240
gcattttttcaagttttatgatttatttaacttgtggaacaaaaataaaccagaaaccaccacctctcacgccaaagctcacaccttcagcctccaacatgaaggtctccgcagcacttctgtggctgctgctcatagcagctgccttcagcccccaggggctcgctgggccagcttctgtcccaaccacctgctgctttaacctggccaataggaagataccccttcagcgactagagagctacaggagaatcaccagtggcaaatgtccccagaaagctgtgatcttcaagaccaaactggccaaggatatctgtgccgaccccaagaagaagtgggtgcaggattccatgaagtatctggaccaaaaatctccaactccaaagccataaataatcaccatttttgaaaccaaaccagagcctgagtgttgcctaatttgttttcccttcttacaatgcattctgaggtaacctcattatcagtccaaagggcatgggttttattatatatatatatattttttttttaaaaaaaaacgtattgcatttaatttattgaggctttaaaacttatcctccatgaatatcagttatttttaaactgtaaagctttgtgcagattctttaccccctgggagccccaattcgatcccctgtcacgtgtgggcaatgttccccctctcctctcttcctccctggaatcttgtaaaggtcctggcaaagatgatcagtatgaaaatgtcattgttcttgtgaacccaaagtgtgactcattaaatggaagtaaatgttgttttaggaatac

SEQ ID NO: 979 - DNA, 2300 bp; single-stranded, linear
  immediate source library: GENBANK
  immediate source clone: g1552531
cccggcgtcccgtcgagcccagccccgccgggggcgctcctcgccgcccgcacgccctccccagccatgtcgtccatcctgcctttcactcccccgatcgtgaagcgcctgctgggctggaagaagggcgagcagaacgggcaggaggagaaatggtgcgagaaggcggtcaagagcctggtcaagaaactcaagaagacggggcagctggacgagctggagaaggccatcaccacgcagaacgtcaacaccaagtgcatcaccatccccaggtccctggatggccggttgcaggtgtcccatcggaaggggctccctcatgtcatctactgccctgtgcgatggccagacctgcacagccaccacgagctgcgggccatggagctgtgtgagttcgccttcaatatgaagaaggacgaggtctgcgtgaatccctaccactaccagagagtagagacaccagttctacctcctgtgttggtgccacgccacacagagatcccggccgagttccccccactggacgactacagccattccatccccgaaaacactaacttccccgcaggcatcgagccccagagcaatattccagagaccccaccccctggctacctgagtgaagatggagaaaccagtgaccaccagatgaaccacagcatggacgcaggttctccaaacctatccccgaatccgatgtccccagcacataataacttggacctgcagccagttacctactgcgagccggccttctggtgctccatctcctactacgagctgaaccagcgcgtcggggagacattccacgcctcgcagccatccatgactgtggatggcttcaccgacccctccaattcggagcgcttctgcctagggctgctctccaatgtcaacaggaatgcagcagtggagctgacacggagacacatcggaagaggcgtgcggctctactacatcggaggggaggtcttcgcagagtgcctcagtgacagcgctatttttgtccagtctcccaactgtaaccagcgctatggctggcacccggccaccgtctgcaagatcccaccaggatgcaacctgaagatcttcaacaaccaggagttcgctgccctcctggcccagtcggtcaaccagggctttgaggctgtctaccagttgacccgaatgtgcaccatccgcatgagcttcgtcaaaggctggggagcggagtacaggagacagactgtgaccagtaccccctgctggattgagctgcacctgaatgggcctttgcagtggcttgacaaggtcctcacccagatgggctccccaagcatccgctgttccagtgtgtcttagagacatcaagtatggtaggggagggcaggcttggggaaaatggccatacaggaggtggagaaaattggaactctactcaacccattgttgtcaaggaagaagaaatctttctccctcaactgaaggggtgcacccacctgttttctgaaacacacgagcaaacccagaggtggatgttatgaacagctgtgtctgccaaacacatttaccctttggccccactttgaagggcaagaaatggcgtctgctctggtggcttaagtgagcagaacaggtagtattacaccaccggcaccctccccccagactctttttttgagtgacagctttctgggatgtcacagtccaaccagaaacgcccctctgtctaggactgcagtgtggagttcaccttggaagggcgttctaggtaggaagagcccgcacgatgcagacctcatgcccagctctctgacgcttgtgacagtgcctcttccagtgaacattcccagcccagccccgccccgttgtgagctggatagacttgggatggggagggagggagttttgtctgtctccctcccctctcagaacatactgattgggaggtgcgtgttcagcagaacctgcacacaggacagcgggaaaaatcgatgagcgccacctctttaaaaactcacttacgttgtcctttttcactttgaaaagttggaaggactgctgaggcccagtgcatatgcaatgtatagtgtctattatcacattaatctcaaagagattcgaatgacggtaagtgttctcatgaagcaggaggcccttgtcgtgggatggcatttggtctcaggcagcaccacactgggtgcgtctccagtcatctgtaagagcttgctccagattctgatgcatacggctatattggtttatgtagtcagttgcattcattaaatcaactttatcatatgctcaaaaaaaaaaaaaag

SEQ ID NO: 980 - DNA, 1670 bp; single-stranded, linear
  immediate source library: GENBANK
  immediate source clone: g1552845
ccaaccacaagcaccaaagcagaggggcaggcagcacaccacccagcagccagagcaccagcccagccatggtccttgaggtgagtgaccaccaagtgctaaatgacgccgaggttgccgccctcctggagaacttcagctcttcctatgactatggagaaaacgagagtgactcgtgctgtacctccccgccctgcccacaggacttcagcctgaacttcgaccgggccttcctgccagccctctacagcctcctctttctgctggggctgctgggcaacggcgcggtggcagccgtgctgctgagccggcggacagccctgagcagcaccgacaccttcctgctccacctagctgtagcagacacgctgctggtgctgacactgccgctctgggcagtggacgctgccgtccagtgggtctttggctctggcctctgcaaagtggcaggtgccctcttcaacatcaacttctacgcaggagccctcctgctggcctgcatcagctttgaccgctacctgaacatagttcatgccacccagctctaccgccgggggcccccggcccgcgtgaccctcacctgcctggctgtctgggggctctgcctgcttttcgccctcccagacttcatcttcctgtcggcccaccacgacgagcgcctcaacgccacccactgccaatacaacttcccacaggtgggccgcacggctctgcgggtgctgcagctggtggctggctttctgctgcccctgctggtcatggcctactgctatgcccacatcctggccgtgctgctggtttccaggggccagcggcgcctgcgggccatgcggctggtggtggtggtcgtggtggcctttgccctctgctggaccccctatcacctggtggtgctggtggacatcctcatggacctgggcgctttggcccgcaactgtggccgagaaagcagggtagacgtggccaagtcggtcacctcaggcctgggctacatgcactgctgcctcaacccgctgctctatgcctttgtaggggtcaagttccgggagcggatgtggatgctgctcttgcgcctgggctgccccaaccagagagggctccagaggcagccatcgtcttcccgccgggattcatcctggtctgagacctcagaggcctcctactcgggcttgtgaggccggaatccgggctcccctttcgcccacagtctgacttccccgcattccaggctcctccctccctctgccggctctggctctccccaatatcctcgctcccgggactcactggcagccccagcaccaccaggtctcccgggaagccaccctcccagctctgaggactgcaccattgctgctccttagctgccaagccccatcctgccgcccgaggtggctgcctggagccccactgcccttctcatttggaaactaaaacttcatcttccccaagtgcggggagtacaaggcatggcgtagagggtgctgccccatgaagccacagcccaggcctccagctcagcagtgactgtggccatggtccccaagacctctatatttgctcttttatttttatgtctaaaatcctgcttaaaacttttcaataaacaagatcgtcaggaccaaaaaaaaaaaaaaaaaaaaaaaaaaaaaaaaaaaaaaaaaaaaaaa

SEQ ID NO: 981 - DNA, 5041 bp; single-stranded, linear
  immediate source library: GENBANK
  immediate source clone: g1572720
gcggccgcgactattcggtacctgaaaacaacgatggcatggaaaacacttcccatttacctgttgttgctgctgtctgttttcgtgattcagcaagtttcatctcaagatttatcaagctgtgcagggagatgtggggaagggtattctagagatgccacctgcaactgtgattataactgtcaacactacatggagtgctgccctgatttcaagagagtctgcactgcggagctttcctgtaaaggccgctgctttgagtccttcgagagagggagggagtgtgactgcgacgcccaatgtaagaagtatgacaagtgctgtcccgattatgagagtttctgtgcagaagtgcataatcccacatcaccaccatcttcaaagaaagcacctccaccttcaggagcatctcaaaccatcaaatcaacaaccaaacgttcacccaaaccaccaaacaagaagaagactaagaaagttatagaatcagaggaaataacagaagaacattctgtttctgaaaatcaagagtcctcctcctcctcctcctcttcctcttcttcttcaacaatttggaaaatcaagtcttccaaaaattcagctgctaatagagaattacagaagaaactcaaagtaaaagataacaagaagaacagaactaaaaagaaacctacccccaaaccaccagttgtagatgaagctggaagtggattggacaatggtgacttcaaggtcacaactcctgacacgtctaccacccaacacaataaagtcagcacatctcccaagatcacaacagcaaaaccaataaatcccagacccagtcttccacctaattctgatacatctaaagagacgtctttgacagtgaataaagagacaacagttgaaactaaagaaactactacaacaaataaacagacttcaactgatggaaaagagaagactacttccgctaaagagacacaaagtatagagaaaacatctgctaaagatttagcacccacatctaaagtgctggctaaacctacacccaaagctgaaactacaaccaaaggccctgctctcaccactcccaaggagcccacgcccaccactcccaaggagcctgcatctaccacacccaaagagcccacacctaccaccatcaagtctgcacccaccacccccaaggagcctgcacccaccaccaccaagtctgcacccaccactcccaaggagcctgcacccaccaccaccaaggagcctgcacccaccactcccaaggagcctgcacccaccaccaccaaggagcctgcacccaccaccaccaagtctgcacccaccactcccaaggagcctgcacccaccacccccaagaagcctgccccaactacccccaaggagcctgcacccaccactcccaaggagcctacacccaccactcccaaggagcctgcacccaccaccaaggagcctgcacccaccactcccaaagagcctgcacccactgcccccaagaagcctgccccaactacccccaaggagcctgcacccaccactcccaaggagcctgcacccaccaccaccaaggagccttcacccaccactcccaaggagcctgcacccaccaccaccaagtctgcacccaccactaccaaggagcctgcacccaccactaccaagtctgcacccaccactcccaaggagccttcacccaccaccaccaaggagcctgcacccaccactcccaaggagcctgcacccaccacccccaagaagcctgccccaactacccccaaggagcctgcacccaccactcccaaggaacctgcacccaccaccaccaagaagcctgcacccaccgctcccaaagagcctgccccaactacccccaaggagactgcacccaccacccccaagaagctcacgcccaccacccccgagaagctcgcacccaccacccctgagaagcccgcacccaccacccctgaggagctcgcacccaccacccctgaggagcccacacccaccacccctgaggagcctgctcccaccactcccaaggcagcggctcccaacacccctaaggagcctgctccaactacccctaaggagcctgctccaactacccctaaggagcctgctccaactacccctaaggagactgctccaactacccctaaagggactgctccaactaccctcaaggaacctgcacccactactcccaagaagcctgcccccaaggagcttgcacccaccaccaccaaggagcccacatccaccacctctgacaagcccgctccaactacccctaaggggactgctccaactacccctaaggagcctgctccaactacccctaaggagcctgctccaactacccctaaggggactgctccaactaccctcaaggaacctgcacccactactcccaagaagcctgcccccaaggagcttgcacccaccaccaccaaggggcccacatccaccacctctgacaagcctgctccaactacacctaaggagactgctccaactacccccaaggagcctgcacccactacccccaagaagcctgctccaactactcctgagacacctcctccaaccacttcagaggtctctactccaactaccaccaaggagcctaccactatccacaaaagccctgatgaatcaactcctgagctttctgcagaacccacaccaaaagctcttgaaaacagtcccaaggaacctggtgtacctacaactaagactcctgcagcgactaaacctgaaatgactacaacagctaaagacaagacaacagaaagagacttacgtactacacctgaaactacaactgctgcacctaagatgacaaaagagacagcaactacaacagaaaaaactaccgaatccaaaataacagctacaaccacacaagtaacatctaccacaactcaagataccacaccattcaaaattactactcttaaaacaactactcttgcacccaaagtaactacaacaaaaaagacaattactaccactgagattatgaacaaacctgaagaaacagctaaaccaaaagacagagctactaattctaaagcgacaactcctaaacctcaaaagccaaccaaagcacccaaaaaacccacttctaccaaaaagccaaaaacaatgcctagagtgagaaaaccaaagacgacaccaactccccgcaagatgacatcaacaatgccagaattgaaccctacctcaagaatagcagaagccatgctccaaaccaccaccagacctaaccaaactccaaactccaaactagttgaagtaaatccaaagagtgaagatgcaggtggtgctgaaggagaaacacctcatatgcttctcaggccccatgtgttcatgcctgaagttactcccgacatggattacttaccgagagtacccaatcaaggcattatcatcaatcccatgctttccgatgagaccaatatatgcaatggtaagccagtagatggactgactactttgcgcaatgggacattagttgcattccgaggtcattatttctggatgctaagtccattcagtccaccatctccagctcgcagaattactgaagtttggggtattccttcccccattgatactgtttttactaggtgcaactgtgaaggaaaaactttcttctttaaggattctcagtactggcgttttaccaatgatataaaagatgcagggtaccccaaaccaattttcaaaggatttggaggactaactggacaaatagtggcagcgctttcaacagctaaatataagaactggcctgaatctgtgtattttttcaagagaggtggcagcattcagcagtatatttataaacaggaacctgtacagaagtgccctggaagaaggcctgctctaaattatccagtgtatggagaaatgacacaggttaggagacgtcgctttgaacgtgctataggaccttctcaaacacacaccatcagaattcaatattcacctgccagactggcttatcaagacaaaggtgtccttcataatgaagttaaagtgagtatactgtggagaggacttccaaatgtggttacctcagctatatcactgcccaacatcagaaaacctgacggctatgattactatgccttttctaaagatcaatactataacattgatgtgcctagtagaacagcaagagcaattactactcgttctgggcagaccttatccaaagtctggtacaactgtccttagactgatgagcaaaggaggagtcaactaatgaagaaatgaataataaattttgacactgaaaaacattttattaataaagaatattgacatgagtataccagtttatatataaaaatgtttttaaacttgacaatcattacactaaaacagatttgataatcttattcacagttgttattgtttacagaccatttaattaatatttcctctgtttattcctcctctccctcccattgcatggctcacacctgtaaaagaaaaaagaatcaaattgaatatatcttttaagaattcaaaactagtgtattcacttaccctagttcattataaaaaatatctaggcattgtggatataaaactgttgggtattctacaacttcaatggaaattattacaagcagattaatccctctttttgtgacacaagtacaatctaaaagttatattggaaaacatggaaatattaaaattttacacttttactagctaaaacataatcacaaagctttatcgtgttgtataaaaaaattaacaatataatggcaataggtagagatacaacaaatgaatataacactataacacttcatattttccaaatcttaatttggatttaaggaagaaatcaataaatataaaatataagcacatatttattatatatctaaggtatacaaatctgtctacatgaagtttacagattggtaaatatcacctgctcaacatgtaattatttaataaaactttggaacattaaaaaaataaattggaggcttaaaaaaaaaaaaaaaaa

SEQ ID NO: 982 - DNA, 728 bp; single-stranded, linear
  immediate source library: GENBANK
  immediate source clone: g1575433
agtcttcgccaccatgccgccctacaccgtggtctatttcccagttcgaggccgctgcgcggccctgcgcatgctgctggcagatcagggccagagctggaaggaggaggtggtgaccgtggagacgtggcaggagggctcactcaaagcctcctgcctatacgggcagctccccaagttccaggacggagacctcaccctgtaccagtccaataccatcctgcgtcacctgggccgcacccttgggctctatgggaaggaccagcaggaggcagccctggtggacatggtgaatgacggcgtggaggacctccgctgcaaatacgtctccctcatctacaccaactatgaggtgggcaaggatgactatgtgaaggcactgcccgggcaactgaagccttttgagaccctgctgtcccagaaccagggaggcaagaccttcattgtgggagaccagatctccttcgctgactacaacctgctggacttgctgctgatccatgaggtcctagcccctggctgcctggatgcgttccccctgctctcagcatatgtggggcgcctcagcgcccggcccaagctcaaggccttcctggcctcccctgagtacgtgaacctccccatcaatggcaacgggaaacagtgagggttggggggactctctgagcgggaggcagagtttgccttcctttctccaggaccaataaaatttctaagagagctaaaaa

SEQ ID NO: 983 - DNA, 1697 bp; single-stranded, linear
  immediate source library: GENBANK
  immediate source clone: g1592737
cgggggggcccgaccaccgcggggccgggacgcgatggcggcggcagagcccgcgagctcgggccagcaggcgccggcagggcaggggcagggccagcggccgccgccgcagcctccgcaggcgcaagccccgcagccgcccccgccgccgcagctcgggggcgcggggggcggcagcagcaggcacgagaagagcctggggctgctcactaccaagttcgtgtcgctgctgcaggaggccaaggacggcgttctggatctcaaagcggctgctgatactttggctgtgaggcaaaaaaggagaatttatgatatcaccaatgtcttagagggaattgacttgattgaaaaaaagtcaaaaaacagtatccagtggaaaggtgtaggtgctggctgtaatactaaagaagtcatagatagattaagatatcttaaagctgaaattgaagatctagaactgaaggaaagagaacttgatcagcagaagttgttgctacagcaaagcatcaaaaatgtgatggacgattccattaataatagattttcctatgtaactcatgaagacatctgtaattgctttaatggtgatacacttttggccattcaggcaccttctggtacacaactggaggtacccattccagaaatgggtcagaatggacaaaagaaataccagatcaatctaaagagtcattcaggacctatccatgtgctgcttataaataaagagtcgagttcatctaagcccgtggtttttcctgttcccccacctgatgacctcacacagccttcctcccagtccttgactccagtgactccacagaaatccagcatggcaactcaaaatctgcctgagcaacatgtctctgaaagaagccaggctctgcagcagacatcagctacagatatatcttcagcaggatctattagtggagatatcattgatgagttaatgtcttctgacgtgtttcctctcttaaggctttctcctaccccggcagatgactacaactttaatttagatgataacgaaggagtttgtgatctgtttgatgtccagatactaaattattagattccatggaaacttgggactgttatctacctctaactgtgtaacattttagacttcttaataacctaaatatttaaaataatgaatgtaacaccttttttagttcactgattctgaagtgttcttccctaatactttctttacttcacaaaacttcaaccataaaaacaaagggctctgattgctttaggggataagtgatttaatattcacaaacgtccccactcccaaaagtaactatattctggatttcaacttttcttctaattgtgaatccttccgttttttcttcttaaggaggaaagttaaaggacactacaggtcatcaaaaacaagttggccaaggactcattacttgtcttatatttttactgccactaaactgcctgtatttctgtatgtccttctatccaaacagacgttcactgccacttgtaaagtgaaggatgtaaacgaggatatataactgtttcagtgaacagattttgtgaagtgccttctgttttagcactttaagtttatcacattttgttgacttctgacattccactttcctaggttataggaaagatctgtttatgtagtttgtttttaaaatgtgccaatgcctgtacattaacaa

SEQ ID NO: 984 - DNA, 1715 bp; single-stranded, linear
  immediate source library: GENBANK
  immediate source clone: g1617516
gccaactccgtggtggtctgggtgaatatccaggccaagaccacaggctatgacacgcactgctacatcttgaacctggccattgccgacctgtgggttgtcctcaccatcccagtctgggtggtcagtctcgtgcagcacaaccagtggcccatgggcgagctcacgtgcaaagtcacacacctcatcttctccatcaacctcttcagcagcattttcttcctcacgtgcatgagcgtggaccgctacctctccatcacctacttcaccaacacccccagcagcaggaagaagatggtacgccgtgtcgtctgcatcctggtgtggctgctggccttctgcgtgtctctgcctgacacctactacctgaagaccgtcacgtctgcgtccaacaatgagacctactgccggtccttctaccccgagcacagcatcaaggagtggctgatcggcatggagctggtctccgttgtcttgggctttgccgttcccttctccattatcgctgtcttctacttcctgctggccagagccatctcggcgtccagtgaccaggagaagcacagcagccggaagatcatcttctcctacgtggtggtcttccttgtctgctggttgccctaccacgtggcggtgctgctggacatcttctccatcctgcactacatccctttcacctgccggctggagcacgccctcttcacggccctgcatgtcacacagtgcctgtcgctggtgcactgctgcgtcaaccctgtcctctacagcttcatcaatcgcaactacaggtacgagctgatgaaggccttcatcttcaagtactcggccaaaacagggctcaccaagctcatcgatgcctccagagtctcagagacggagtactctgccttggagcagagcaccaaatgatctgccctggagaggctctgggacgggtttacttgtttttgaacagggtgatgggccctatggttttctagagcaaagcaaagtagcttcgggtcttgatgcttgagtagagtgaagaggggagcacgtgccccctgcatccatttctctttctcttgatgacgcagctgtcatttggctgtgcgtgctgacagttttgcaacaggcagagctgtgtcgcacagcagtgctgtgcgtcagagccagctgaggacaggcttgcctggacttctgtaagataggattttctgtgtttcctgaattttttatatggtgatttgtatttaaattttaagactttattttctcactattggtgtaccttataaatgtatttgaaagttaaatatattttaaatattgtttgggaggcatagtgctgacatatattcagagtgttgtagttttaaggttagcgtgactttcagttttgactaaggatgacactaattgttagctgttttgaaattatatatatataaatatataaatatatgccagtcttggctgaaatgttttatttaccatagttttatatctgtgtggtgttttgtaccggcacgggatatggaacgaaaactgctttgtaatgcagtttgtgacattaatagtattgtaaagttacattttaaaataaacaaaaaactgttctggactgcaaatctgcacacacaacgaacagttgcatttcagagagttctctcaatttgtaagttatttttttttaataaagatttttgtttcctaaaaaaaaaaaaaaaaaaaaa

SEQ ID NO: 985 - DNA, 1921 bp; single-stranded, linear
  immediate source library: GENBANK
  immediate source clone: g1619596
gcaggaggaaggagcctccctcagggtttcgggaaccagatctctcaccaggaaagactgatacagaacgatcgatacagaaaccacgctgccgccaccacaccatcaccatcgacagaacagtccttaatccagaaacctgaaatgaaggaagaggagactctgcgcagagcactttgggtccggagggcgagactccggcggaagcattcccgggcgggtgacccagcacggtccccttggaattggattcgccattttatttttcttgctgctaaatcaccgagccccggaagattagagagttttatttctgggattcctgtagacacacccacccacatacatacatttatatatatatatattatatatatataaaaataaatatctctattttatatatataaaatatatatattctttttttaaattaacagtgctaatgttattggtgtcttcactggatgtatttgactgctgtggacttgagttgggaggggaatgttcccactcagatcctgacagggaagaggaggagatgagagactctggcatgatcttttttttgtcccacttggtggggccagggtcctctcccctgcccaggaatgtgcaaggccagggcatgggggtatatatgacccagttttgggaacaccgacaaacccagccctggcgctgagcctctctaccccaggtcagacggacagaaagacagatcacaggtacagggatgaggacaccggctctgaccaggagtttggggagcttcaggacattgctgtgctttggggattccctccacatgctgcacgcgcatctccgcccagggcactgcctggttcaggagcctgggcgccttcgcttactctcacctgcttctgagttgcccaggaggccactggcagatgtcccggcgaagagaagagacacattgttggaagaagcagcccatgacagctccccttcctgggactcgccctcatcctcttcctgctccccttcctggggtgcagcctaaaaggacctatgtcctcacaccattgaaaccactagttctgtcccccaggagacctggttgtgtgtgtgtgagtggttgaccttcctccatcccctggtccttcccttcccttcccgaggcacagagagacagggcaggatccacgtgcccattgtggaggcagagaaaagagaaagtgttttatatacggtacttatttaatatccctttttaattagaaattaaaacagttaatttaattaaagagtagggttttttttcagtattcttggttaatatttaatttcaactatttatgagatgtatcttttgctctctcttgctctcttatttgtaccggtttttgtatataaaattcatgtttccaatctctctctccctgatcggtgacagtcactagcttatcttgaacagatatttaattttgctaacactcagctctgccctccccgatcccctggctccccagcacacattcctttgaaataaggtttcaatatacatctacatactatatatatatttggcaacttgtatttgtgtgtatatatatatatatatgtttatgtatatatgtgattctgataaaatagacattgctattctgttttttatatgtaaaaacaaaacaagaaaaaatagagaattctacatactaaatctctctccttttttaattttaatatttgttatcatttatttattggtgctactgtttatccgtaataattgtggggaaaagatattaacatcacgtctttgtctctagtgcagtttttcgagatattccgtagtacatatttatttttaaacaacgacaaagaaatacagatatatcttaaaaaaaaaaaagcattttgtattaaagaatttaattctgatctcaaagctcctctt

SEQ ID NO: 986 - DNA, 1371 bp; single-stranded, linear
  immediate source library: GENBANK
  immediate source clone: g1620019
ggaacttccaggtgttactgtaattcctcaacgtattgtttcgacagcactaatttaatgccgatatactctagatgaagttttacattgttgagctattgctgttctcttgggaactgaactcactttcctcctgaggctttggatttgacattgcatttgaccttttatgtagtaattgacatgtgccagggcaatgatgaatgagaatctacccccagatccaagcatcctgagcaactcttgattatccatattgagtcaaatggtaggcatttcctatcacctgtttccattcaacaagagcactacattcatttagctaaacggattccaaagagtagaattgcattgaccacgactaatttcaaaatgctttttattattattattttttagacagtctcactttgtcgcccaggccggagtgcagtggtgcgatctcagatcagtgtaccatttgcctcccgggctcaagcgattctcctgcctcagcctcccaagtagctgggattacaggcacctgccaccatgcccggctaatttttgtaattttagtagagacagggtttcaccatgttgcccaggctggtttcgaactcctgacctcaggtgatccacccgcctcggcctcccaaagtgctgggattacaggcttgagcccccgcgcccagccatcaaaatgctttttatttctgcatatgttgaatactttttacaatttaaaaaaaatgatctgttttgaaggcaaaattgcaaatcttgaaattaagaaggcaaaaatgtaaaggagtcaaaactataaatcaagtatttgggaagtgaagactggaagctaatttgcattaaattcacaaacttttatactctttctgtatatacattttttttctttaaaaaacaactatggatcagaatagccacatttagaacactttttgttatcagtcaatatttttagatagttagaacctggtcctaagcctaaaagtgggcttgattctgcagtaaatcttttacaactgcctcgacacacataaacctttttaaaaatagacactccccgaagtcttttgttcgcatggtcacacactgatgcttagatgttccagtaatctaatatggccacagtagtcttgatgaccaaagtcctttttttccatctttagaaaactacatgggaacaaacagatcgaacagttttgaagctactgtgtgtgtgaatgaacactcttgctttattccagaatgctgtacatctattttggattgtatattgtgtttgtgtatttacgctttgattcatagtaacttcttatggaattgatttgcattgaacacaaactgtaaataaaaagaaatggctgaaag

SEQ ID NO: 987 - DNA, 417 bp; single-stranded, linear
  immediate source library: GENBANK
  immediate source clone: g1628406
atgtggggagttttccttctttatgtttccatgaagatgggaggcactacaggacaaaacattgaccagcccactgagatgacagctacggaaggtgccattgtccagatcaactgcacgtaccagacatctgggttcaacgggctgttctggtaccagcaacatgctggcgaagcacccacatttctgtcttacaatgttctggatggtttggaggagaaaggtcgtttttcttcattccttagtcggtctaaagggtacagttacctccttttgaaggagctccagatgaaagactctgcctcttacctctgtgctgtgatagggggttcaggaaacacacctcttgtctttggaaagggcacaagactttctgtgattgcaaatatccagaaccctgaccctgccgtgtaccag

SEQ ID NO: 988 - DNA, 462 bp; single-stranded, linear
  immediate source library: GENBANK
  immediate source clone: g1628410
atgagcatcagcctcctgtgctgtgcagcctttcctctcctgtgggcaggtccagtgaatgctggtggtgtcactcagaccccaaaattccgcatcctgaagataggacagagcatgacactgcagtgtgcccaggatatgaaccataactacatgtactggtatcgacaagacccaggcatggggctgaagctgatttattattcagttggtgctggtatcactgacaaaggagaagtcccgaatggatacaacgtctccagatcaaccacagaggatttcccgctcaggctggagttggctgctccctcccagacatctgtgtacttctgtgccagcagtaggggtggggccgggctcaatgagcagttcttcgggccagggacacggctcaccgtgctagaggacctgaaaaaggtgttcccacccgaggtcgctgtgtttgagccatcagaagcttcc

SEQ ID NO: 989 - DNA, 5503 bp; single-stranded, linear
  immediate source library: GENBANK
  immediate source clone: g1657311
agccgccgccggggctgtaggcgccaaggccatgtccgactcgtgggtcccgaactccgcctcgggccaggacccagggggccgccggagggcctgggccgagctgctggcgggaagggtcaagagggaaaaatataatcctgaaagggcacagaaattaaaggaatcagctgtgcgcctcctgcgaagccatcaggacctgaatgcccttttgcttgaggtagaaggtccactgtgtaaaaaattgtctctcagcaaagtgattgactgtgacagttctgaggcctatgctaatcattctagttcatttataggctctgctttgcaggatcaagcctcaaggctgggggttcccgtgggtattctctcagccgggatggttgcctctagcgtgggacagatctgcacggctccagcggagaccagtcaccctgtgctgctgactgtggagcagagaaagaagctgtcttccctgttagagtttgctcagtatttattggcacacagtatgttctcccgtctttccttctgtcaagaattatggaaaatacagagttctttgttgcttgaagcggtgtggcatcttcacgtacaaggcattgtgagcctgcaagagctgctggaaagccatcccgacatgcatgctgtgggatcgtggctcttcaggaatctgtgctgcctttgtgaacagatggaagcatcctgccagcatgctgacgtcgccagggccatgctttctgattttgttcaaatgtttgttttgaggggatttcagaaaaactcagatctgagaagaactgtggagcctgaaaaaatgccgcaggtcacggttgatgtactgcagagaatgctgatttttgcacttgacgctttggctgctggagtacaggaggagtcctccactcacaagatcgtgaggtgctggttcggagtgttcagtggacacacgcttggcagtgtaatttccacagatcctctgaagaggttcttcagtcataccctgactcagatactcactcacagccctgtgctgaaagcatctgatgctgttcagatgcagagagagtggagctttgcgcggacacaccctctgctcacctcactgtaccgcaggctctttgtgatgctgagtgcagaggagttggttggccatttgcaagaagttctggaaacgcaggaggttcactggcagagagtgctctcctttgtgtctgccctggttgtctgctttccagaagcgcagcagctgcttgaagactgggtggcgcgtttgatggcccaggcattcgagagctgccagctggacagcatggtcactgcgttcctggttgtgcgccaggcagcactggagggcccctctgcgttcctgtcatatgcagactggttcaaggcctcctttgggagcacacgaggctaccatggctgcagcaagaaggccctggtcttcctgtttacgttcttgtcagaactcgtgccttttgagtctccccggtacctgcaggtgcacattctccacccacccctggttcccagcaagtaccgctccctcctcacagactacatctcattggccaagacacggctggccgacctcaaggtttctatagaaaacatgggactctacgaggatttgtcatcagctggggacattactgagccccacagccaagctcttcaggatgttgaaaaggccatcatggtgtttgagcatacggggaacatcccagtcaccgtcatggaggccagcatattcaggaggccttactacgtgtcccacttcctccccgccctgctcacacctcgagtgctccccaaagtccctgactcccgtgtggcgtttatagagtctctgaagagagcagataaaatccccccatctctgtactccacctactgccaggcctgctctgctgctgaagagaagccagaagatgcagccctgggagtgagggcagaacccaactctgctgaggagcccctgggacagctcacagctgcactgggagagctgagagcctccatgacagaccccagccagcgtgatgttatatcggcacaggtggcagtgatttctgaaagactgagggctgtcctgggccacaatgaggatgacagcagcgttgagatatcaaagattcagctcagcatcaacacgccgagactggagccacgggaacacattgctgtggacctcctgctgacgtctttctgtcagaacctgatggctgcctccagtgtcgctcccccggagaggcagggtccctgggctgccctcttcgtgaggaccatgtgtggacgtgtgctccctgcagtgctcacccggctctgccagctgctccgtcaccagggcccgagcctgagtgccccacatgtgctggggttggctgccctggccgtgcacctgggtgagtccaggtctgcgctcccagaggtggatgtgggtcctcctgcacctggtgctggccttcctgtccctgcgctctttgacagcctcctgacctgtaggacgagggattccttgttcttctgcctgaaattttgtacagcagcaatttcttactctctctgcaagttttcttcccagtcacgagatactttgtgcagctgcttatctccaggccttattaaaaagtttcagttcctcatgttcagattgttctcagaggcccgacagcctctttctgaggaggacgtagccagcctttcctggagacccttgcaccttccttctgcagactggcagagagctgccctctctctctggacacacagaaccttccgagaggtgttgaaagaggaagatgttcacttaacttaccaagactggttacacctggagctggaaattcaacctgaagctgatgctctttcagatactgaacggcaggacttccaccagtgggcgatccatgagcactttctccctgagtcctcggcttcagggggctgtgacggagacctgcaggctgcgtgtaccattcttgtcaacgcactgatggatttccaccaaagctcaaggagttatgaccactcagaaaattctgatttggtctttggtggccgcacaggaaatgaggatattatttccagattgcaggagatggtagctgacctggagctgcagcaagacctcatagtgcctctcggccacaccccttcccaggagcacttcctctttgagattttccgcagacggctccaggctctgacaagcgggtggagcgtggctgccagccttcagagacagagggagctgctaatgtacaaacggatcctcctccgcctgccttcgtctgtcctctgcggcagcagcttccaggcagaacagcccatcactgccagatgcgagcagttcttccacttggtcaactctgagatgagaaacttctgctcccacggaggtgccctgacacaggacatcactgcccacttcttcaggggcctcctgaacgcctgtctgcggagcagagacccctccctgatggtcgacttcatactggccaagtgccagacgaaatgccccttaattttgacctctgctctggtgtggtggccgagcctggagcctgtgctgctctgccggtggaggagacactgccagagcccgctgccccgggaactgcagaagctacaagaaggccggcagtttgccagcgatttcctctcccctgaggctgcctccccagcacccaacccggactggctctcagctgctgcactgcactttgcgattcaacaagtcagggaagaaaacatcaggaagcagctaaagaagctggactgcgagagagaggagctattggttttccttttcttcttctccttgatgggcctgctgtcgtcacatctgacctcaaatagcaccacagacctgccaaaggctttccacgtttgtgcagcaatcctcgagtgtttagagaagaggaagatatcctggctggcactctttcagttgacagagagtgacctcaggctggggcggctcctcctccgtgtggccccggatcagcacaccaggctgctgcctttcgctttttacagtcttctctcctacttccatgaagacgcggccatcagggaagaggccttcctgcatgttgctgtggacatgtacttgaagctggtccagctcttcgtggctggggatacaagcacagtttcacctccagctggcaggagcctggagctcaagggtcagggcaaccccgtggaactgataacaaaagctcgtctttttctgctgcagttaatacctcggtgcccgaaaaagagcttctcacacgtggcagagctgctggctgatcgtggggactgcgacccagaggtgagcgccgccctccagagcagacagcaggctgcccctgacgctgacctgtcccaggagcctcatctcttctgacgggacctgccactgcacaccagcccagctcccgtgtaaataatttattacaagcataacatggagctcttgttgcactaaaaagtggattacaaatctcctcgactgctttagtggggaaaggaatcaattatttatgaactgtccggccccgagtcactcagcgtttgcgggaaaataaaccactggtcccagagcagaggaaggctacttgagccggacaccaagcccgcctccagcaccaagggcgggcagcaccctccgaccctcccatgcgggtgcacacgaagggtgaggctgacacagccactgcggagtccaggctgctagaggtgctcatcctcactgccgtcctcaggtgggttcgggcttcaccgcctggccctctgtggtcacagaggggctcggtggcccaggtggtggttccgcctccaggggcagggccttgtcctgggtctgtgtcagcgggtgcaccatggacatgtgtacattgaggttgtgggccttctcaaaccgccggccacactggtcacaggcaaagtccagctcagtctcagccttgtgtttggtcatgtggtacttgagggatgcccgctgcctgcactggaacccacagacctcacacctgggggacagaggcagataagaaggtgcgaggccacagccctgggagggggtcctgactcacacttactgcaaaggcttggctcccgaatgtcgcatttggtggacgagaaggtgcttccgctgcttgaaggtttgtccacattcgtcacagatatagttccgcacctctgagaggggagagtccagtgagtccaggcccctgatgctccaacctcccggggggacgacgatgacaatgtgaaaccatcacagctgggaagacatttctgcacatggttcaccatgcagtgggcccaagcaaggggcctatgagggcctcgtttattaagatctttaaactgctttatacactgtcacgtggcttcatcagctgtgtgcatttcaggatggtttttaaagaaacctcagaaagctatttccttaaaaaaaaaaaaaaaaaaaaaaaaaaaaaaaaaaaaaaaaaaaaaaaaaaaaaaa

SEQ ID NO: 990 - DNA, 736 bp; single-stranded, linear
  immediate source library: GENBANK
  immediate source clone: g1658074
aagctttattaaaatgtctaaaggtgaagaattattcactggtgttgtcccaattttggttgaattagatggtgatgttaatggtcacaaattttctgtctccggtgaaggtgaaggtgatgctacttacggtaaattgaccttaaaatttatttgtactactggtaaattgccagttccatggccaaccttagtcactactttcggttatggtgttcaatgttttgctagatacccagatcatatgaaacaacatgactttttcaagtctgccatgccagaaggttatgttcaagaaagaactatttttttcaaagatgacggtaactacaagaccagagctgaagtcaagtttgaaggtgataccttagttaatagaatcgaattaaaaggtattgattttaaagaagatggtaacattttaggtcacaaattggaatacaactataactctcacaatgtttacatcatggctgacaaacaaaagaatggtatcaaagttaacttcaaaattagacacaacattgaagatggttctgttcaattagctgaccattatcaacaaaatactccaattggtgatggtccagtcttgttaccagacaaccattacttatccactcaatctgccttatccaaagatccaaacgaaaagagagaccacatggtcttgttagaatttgttactgctgctggtattacccatggtatggatgaattgtacaaataactgcag

SEQ ID NO: 991 - DNA, 4389 bp; single-stranded, linear
  immediate source library: GENBANK
  immediate source clone: g1666422
cggatcgcctcgggttgggctcgggctccggggggggtgtcccccgtgccgggtcccggtatgggtggggacgctccaaccatggcccgtgcccaggcgctcgtgttggaactcaccttccagctctgcgcgccggagaccgagactccggaagttggttgcaccttcgaggagggaagtgacccagcagtgccctgcgagtacagccaggcccagtacgatgacttccagtgggacccgggctcacctgcggacctgccccacggctcctacttgatggtcaacacttcccagcatgccccaggccagcgagcccatgtcatcttccagagcctgagcgagaatgatacccactgtgtgcagttcagctacttcctgtacagccgggacgggcacagcccgggcaccctgggcgtctacgtgcgcgttaatgggggccccctgggcagtgctgtgtggaatatgactggatcccacggccgtcagtggcaccaggctgagctggctgtcagcactttctggcccaatgaatatcaagtgctgtttgaggccctcatctccccagaccgcaggggctacatgggcctagatgacatctgcattctcagctacccctgcgcaaaggccccacacttctcccgcctgggcgacgtggaggtcaacgcgggccagaacgcgtcgttccagtgcatggccgcgggcagagccgaggccgaacgcttcctcttgcaacggcagagcggggcgctggtgccggcggcgggcgtgcggcacatcagccaccgcagcttcctggccactttcccgctggctgccgtgagccgcgccgagcaggacctgtaccgctgtgtgtcccaggccccgcgcggacgcgggacgtctctcaacttcgcggagtttatggtcaaggagcccccaactcccatcgcgcccccacagctgctgcgtgctggccccacctacctcatcatccagctcaacaccaactccatcattggcgacgggccgatcgtgcgcaaggagattgagtaccgcatggcgcgcgggccctgggctgaggtgcacgccgtcagcctgcagacctacaagctgtggcacctcgaccccgacacagagtatgagatcagcgtgctgctcacgcgtcccggagacggcggcactggccgccttgggccacccttcatcagccgcaccaaatgcgcagagcccatgagggcccccaaaggcctggcttttgctgagatccaggcccgtcagctgaccctgcagtgggaaccactgggctacaacgtgacgcgttgccacacctatactgtgtcgctgtgctatcactacaccctgggcagcagccacaaccagaccataccgagagtgtgtgaagacagagcaaggtgtcagccgctacaccatgaagaacctgctgccctatcggaacgttcacgtgaggttgtcctcactaaccctgaggggcgcaaagagggcaaggaggtcactttccagacggatgaggatgtgcccagtgggattgcagccgagtccctgaccttcactccactggaggacatgatcttcctcaagtgggaggagccccaggagcccaatggtctcatcacccagtatgagatcagctaccagagcatcgagtcatcagacccggcagtgaacgtgcaggccacgagtaccatctccaagctccgcaatgagacctaccatgtcttctccaacctgcacccaggcaccacctacctgttctccgttggggcccggacaggcaaagggttcggccaggcggcactcactgagataaccacttacatctctgctcccagcttggattatgccgacatgccgtcacccctgggcgagtctgagaacaacatcaccgtgctgctgaggccggcacagggccgcggtgcgcccatcagtgtgtaccaggtgattgtggaggaggagcagggcagcaggaggctgcggcgggagccaggtggacaggactgcttcccagtgccattgaccttcgaggcggcgctggcccgagggctggtggactacttcggggccgaactggcggccagcagtctacctgaggccatgccctttaccgtgggtgacaacaagacctaccgaggcttctggaacccaccacttgagcctaggaaggcctatctcatctacttccaggcagcaagccacctgaagggggagacccggctgaattgcatccgcattgccaggaaagctgcctgcaaggaaagcaagcggcccctggaggtgtcccagagatcggaggagatggggcttatcctgggcatctgtgcaggggggcttgctgtcctcatccttctcctgggtgccatcattgtcatcatccgcaaagggagagaccactatgcctactcctactacccgaagccggtgaacatgaccaaggccaccgtcaactaccgccaggagaagacacacatgatgagcgccgtggaccgcagcttcacagaccagagcaccctgcagccccctgggctgtccttcatggacacccatggctacagcacccggggagaacagcgcagcggtggggtcactgaggccagcagcctcctggggggctccccgaggcgtccctgtggccggaagggctccccataccacacggtgcagctgcaccctgcggtgcgtgtcgcagaccttctgcagcacatcaaccagatgaagacggccgagggttacggcttcaagcaggagtatgagagcttctttgaaggctgggacgccacaaagaagaaagacaaggtcaagggcagccggcaggagccaatgcctgcctatgatcggcaccgagtgaaactgcacccgatgctgggagaccccaatgccgactacattaatgccaactacatagatggttaccacaggtcaaaccacttcatagccactcaagggccgaagcctgagatggtctatgacttctggcgtatggtgtggcaggagcactgttccagcatcgtcatgatcaccaagctggtcgaggtggcagggtgtaaatgctcacggtactggccggaggactcagacacctacggggacatcaagattatgctggtgaagacagagaccctggctgagtatgtcgtgcgcacttttgccctggagcggagaggctactctgcccggtacgaggtccgccagttccacttcacagcgtggccagagcatggcgtcccctaccataccacggggctgctggctttcatccggcgcgtgaaggcctccaccccacctgatgccgggcccattgtcatccactgcagcgcgggcaccggccgcacaggttgctatatcgtcctggatgtgatgctggacatggcagagtgtgagggcgtcgtggacatttacaactgtgtgaagactctctgctcccggtgtgtcaacatgatccagactgaggagcagtacatcttcattcatgatgcaatcctggaggcctgcctgtgtggggagaccaccatccctgtcagtgagttcaaggccacctacaaggagatgatccgcattgatcctcagagtaattcctcccagctgcgggaagagttccagacgctgaactcggtcacccccccgctggacgtggaggagtacagcatcgccctgttgccccggaaccgcgacaagaaccgcagcatggacgtcctgccgcccgaccgctgcctgcccttcctcatctccactgatggggactccaacaactacattaatgcagccctgactgacagctacacacggagtgcggccttcatcgtgaccctgcacccgctgcagagcaccacgcccgacttctggcggctggtctacgattacgggtgcacctccatcgtcatgctcaaccagctgaaccagtccaactccgcctggccctgcctgcagtactggccagagccaggccggcagcaatatggcctcatggaggtggagtttatgtcgggcacagctgatgaagacttagtggctcgagtcttccgggtgcagaacatctctcggttgcaggaggggcacctgctggtgcggcacttccagttcctgcgctggtctgcataccgggacacacctgactccgagaaggccttcttgcacctgctggctgaggtggacaagtggcaggccgagagtggggatgggcgcaccatcgtgcactgcctaaacgggggaggacgcaggggtacctcctgcgccctgcggacggtcctggagatgatccgctgccacaacttggtggacgtttcttttgctgccaaaaccctccggaactacaaacccaacatggtggagaccatggatcagtaccacttttgctacgatgtggccctggagtacttggaggctggagtaagatag

SEQ ID NO: 992 - DNA, 1158 bp; single-stranded, linear
  immediate source library: GENBANK
  immediate source clone: g1668735
aaaaataaaaatgtttttaaggagtgaatgtcttttatgtgtctctgtgaccaggtcccgctgccttgatggattatacacttgacctcagtgtgacaacagtgaccgactactactaccctgatatcttctcaagcccctgtgatgcggaacttattcagacaaatggcaagttgctccttgctgtcttttattgcctcctgtttgtattcagtcttctgggaaacagcctggtcatcctggtccttgtggtctgcaagaagctgaggagcatcacagatgtatacctcttgaacctggccctgtctgacctgctttttgtcttctccttcccctttcagacctactatctgctggaccagtgggtgtttgggactgtaatgtgcaaagtggtgtctggcttttattacattggcttctacagcagcatgtttttcatcaccctcatgagtgtggacaggtacctggctgttgtccatgccgtgtatgccctaaaggtgaggacgatcaggatgggcacaacgctgtgcctggcagtatggctaaccgccattatggctaccatcccattgctagtgttttaccaagtggcctctgaagatggtgttctacagtgttattcattttacaatcaacagactttgaagtggaagatcttcaccaacttcaaaatgaacattttaggcttgttgatcccattcaccatctttatgttctgctacattaaaatcctgcaccagctgaagaggtgtcaaaaccacaacaagaccaaggccatcaggttggtgctcattgtggtcattgcatctttacttttctgggtcccattcaacgtggttcttttcctcacttccttgcacagtatgcacatcttggatggatgtagcataagccaacagctgacttatgccacccatgtcacagaaatcatttcctttactcactgctgtgtgaaccctgttatctatgcttttgttggggagaagttcaagaaacacctctcagaaatatttcagaaaagttgcagccaaatcttcaactacctaggaagacaaatgcctagggagagctgtgaaaagtcatcatcctgccagcagcactcctcccgttcctccagcgtagactacattttgtgaggatcaatgaagactaaatata

SEQ ID NO: 993 - DNA, 1255 bp; single-stranded, linear
  immediate source library: GENBANK
  immediate source clone: g1668737
ataatttgggttcactgtggctacttgaacactacactgcagctaactctatctttgtttcctttccaggaatcaatgaatttcagcgatgttttcgactccagtgaagattattttgtgtcagtcaatacttcatattactcagttgattctgagatgttactgtgctccttgcaggaggtcaggcagttctccaggctatttgtaccgattgcctactccttgatctgtgtctttggcctcctggggaatattctggtggtgatcacctttgctttttataagaaggccaggtctatgacagacgtctatctcttgaacatggccattgcagacatcctctttgttcttactctcccattctgggcagtgagtcatgccactggtgcgtgggttttcagcaatgccacgtgcaagttgctaaaaggcatctatgccatcaactttaactgcgggatgctgctcctgacttgcattagcatggaccggtacatcgccattgtacaggcgactaagtcattccggctccgatccagaacactaccgcgcagcaaaatcatctgccttgttgtgtgggggctgtcagtcatcatctccagctcaacttttgtcttcaaccaaaaatacaacacccaaggcagcgatgtctgtgaacccaagtaccagactgtctcggagcccatcaggtggaagctgctgatgttggggcttgagctactctttggtttctttatccctttgatgttcatgatattttgttacacgttcattgtcaaaaccttggtgcaagctcagaattctaaaaggcacaaagccatccgtgtaatcatagctgtggtgcttgtgtttctggcttgtcagattcctcataacatggtcctgcttgtgacggctgcaaatttgggtaaaatgaaccgatcctgccagagcgaaaagctaattggctatacgaaaactgtcacagaagtcctggctttcctgcactgctgcctgaaccctgtgctctacgcttttattgggcagaagttcagaaactactttctgaagatcttgaaggacctgtggtgtgtgagaaggaagtacaagtcctcaggcttctcctgtgccgggaggtactcagaaaacatttctcggcagaccagtgagaccgcagataacgacaatgcgtcgtccttcactatgtgatagaaagctgagtctccctaaggcatgtgtgaaacatactcatagatgttatgcaaaaaaaagtctatgg

SEQ ID NO: 994 - DNA, 2653 bp; single-stranded, linear
  immediate source library: GENBANK
  immediate source clone: g1684902
gagcgcggctggagtttgctgctgccgctgtgcagtttgttcaggggcttgtggcggtgagtccgagaggctgcgtgtgagagacgtgagaaggatcctgcactgaggaggtggaaagaagaggattgctcgaggaggcctggggtctgtgagacagcggagctgggtgaaggctgcgggttccggcgaggcctgagctgtgctgtcgtcatgcctcaaacccgatcccaggcacaggctacaatcagttttccaaaaaggaagctgtctcgggcattgaacaaagctaaaaactccagtgatgccaaactagaaccaacaaatgtccaaaccgtaacctgttctcctcgtgtaaaagccctgcctctcagccccaggaaacgtctgggcgatgacaacctatgcaacactccccatttacctccttgttctccaccaaagcaaggcaagaaagagaatggtccccctcactcacatacacttaagggacgaagattggtatttgacaatcagctgacaattaagtctcctagcaaaagagaactagccaaagttcaccaaaacaaaatactttcttcagttagaaaaagtcaagagatcacaacaaattctgagcagagatgtccactgaagaaagaatctgcatgtgtgagactattcaagcaagaaggcacttgctaccagcaagcaaagctggtcctgaacacagctgtcccagatcggctgcctgccagggaaagggagatggatgtcatcaggaatttcttgagggaacacatctgtgggaaaaaagctggaagcctttacctttctggtgctcctggaactggaaaaactgcctgcttaagccggattctgcaagacctcaagaaggaactgaaaggctttaaaactatcatgctgaattgcatgtccttgaggactgcccaggctgtattcccagctattgctcaggagatttgtcaggaagaggtatccaggccagctgggaaggacatgatgaggaaattggaaaaacatatgactgcagagaagggccccatgattgtgttggtattggacgagatggatcaactggacagcaaaggccaggatgtattgtacacgctatttgaatggccatggctaagcaattctcacttggtgctgattggtattgctaataccctggatctcacagatagaattctacctaggcttcaagctagagaaaaatgtaagccacagctgttgaacttcccaccttataccagaaatcagatagtcactattttgcaagatcgacttaatcaggtatctagagatcaggttctggacaatgctgcagttcaattctgtgcccgcaaagtctctgctgtttcaggagatgttcgcaaagcactggatgtttgcaggagagctattgaaattgtagagtcagatgtcaaaagccagactattctcaaaccactgtctgaatgtaaatcaccttctgagcctctgattcccaagagggttggtcttattcacatatcccaagtcatctcagaagttgatggtaacaggatgaccttgagccaagagggagcacaagattccttccctcttcagcagaagatcttggtttgctctttgatgctcttgatcaggcagttgaaaatcaaagaggtcactctggggaagttatatgaagcctacagtaaagtctgtcgcaaacagcaggtggcggctgtggaccagtcagagtgtttgtcactttcagggctcttggaagccaggggcattttaggattaaagagaaacaaggaaacccgtttgacaaaggtgtttttcaagattgaagagaaagaaatagaacatgctctgaaagataaagctttaattggaaatatcttagctactggattgccttaaattcttctcttacaccccacccgaaagtattcagctggcatttagagagctacagtcttcattttagtgctttacacattcgggcctgaaaacaaatatgaccttttttacttgaagccaatgaattttaatctatagattctttaatattagcacagaataatatctttgggtcttactatttttacccataaaagtgaccaggtagaccctttttaattacattcactacttctaccacttgtgtatctctagccaatgtgcttgcaagtgtacagatctgtgtagaggaatgtgtgtatatttacctcttcgtttgctcaaacatgagtgggtatttttttgtttgttttttttgttgttgttgtttttgaggcgcgtctcaccctgttgcccaggctggagtgcaatggcgcgttctctgctcactacagcacccgcttcccaggttgaagtgattctcttgcctcagcctcccgagtagctgggattacaggtgcccaccaccgcgcccagctaattttttaatttttagtagagacagggttttaccatgttggccaggctggtcttgaactcctgaccctcaagtgatctgcccaccttggcctccctaagtgctgggattataggcgtgagccaccatgctcagccattaaggtattttgttaagaactttaagtttagggtaagaagaatgaaaatgatccagaaaaatgcaagcaagtccacatggagatttggaggacactggttaaag

SEQ ID NO: 995 - DNA, 2258 bp; single-stranded, linear
  immediate source library: GENBANK
  immediate source clone: g177181
agtgaaagcccgcagttgtcttactaagaagagaagccttcaatggatccagctgtggctctggtgctctgtctctcctgtttgtttctcctttcactctggaggcagagctctggaagagggaggctcccgtctggccccactcctctcccgattattggaaatatcctgcagttagatgttaaggacatgagcaaatccttaaccaatttctcaaaagtctatggccctgtgttcactgtgtattttggcctgaagcccattgtggtgttgcatggatatgaagcagtgaaggaggccctgattgatcatggagaggagttttctggaagaggaagttttccagtggctgaaaaagttaacaaaggacttggaatccttttcagcaatggaaagagatggaaggagatccggcgtttctgcctcatgactctgcggaattttgggatggggaagaggagcatcgaggaccgtgttcaagaggaagcccgctgccttgtggaggagttgagaaaaaccaatgcctcaccctgtgatcccactttcatcctgggctgtgctccctgcaatgtgatctgctctgttattttccatgatcgatttgattataaagatcagaggtttcttaacttgatggaaaaattcaatgaaaacctcaggattctgagctctccatggatccaggtctgcaataatttccctgctctcatcgattatctcccaggaagtcataataaaatagctgaaaattttgcttacattaaaagttatgtattggagagaataaaagaacatcaagaatccctggacatgaacagtgctcgggactttattgattgtttcctgatcaaaatggaacaggaaaagcacaatcaacagtctgaatttactgttgaaagcttgatagccactgtaactgatatgtttggggctggaacagagacaacgagcaccactctgagatatggactcctgctcctgctgaagtacccagaggtcacagctaaagtccaggaagagattgaatgtgtagttggcagaaaccggagcccctgtatgcaggacaggagtcacatgccctacacagatgctgtggtgcacgagatccagagatacattgacctcctccccaccaacctgccccatgcagtgacctgtgatgttaaattcaaaaactacctcatccccaagggcatgaccataataacatccctgacttctgtgctgcacaatgacaaagaattccccaacccagagatgtttgaccctggccactttctggataagagtggcaactttaagaaaagtgactacttcatgcctttctcagcaggaaaacggatgtgtatgggagagggcctggcccgcatggagctgtttttattcctgaccaccattttgcagaactttaacctgaaatctcaggttgacccaaaggatattgacatcacccccattgccaatgcatttggtcgtgtgccacccttgtaccagctctgcttcattcctgtctgaagaagggcagatagtttggctgctcctgtgctgtcacctgcaattctcccttatcagggccattggcctctcccttctctctatgagggatattttctctgacttgtcaatccacatcttcccattccctcaagatccaatgaacatccaacctccattaaagagagtttcttgggtcacttcctaaatatatctgctattctccatactctgtatcacttgtattgaccaccacatatgctaatacctatctactgctgagttgtcagtatgttatcactataaaacaaagaaaaatgattaataaatgacaattcagagccatttattctctgcatgctctagataaaaatgattattatttactgggtcagttcttagatttctttcttttgagtaaaatgaaagtaagaaatgaaagaaaatagaatgtgaagaggctgtgctggccctcatagtgttaagcacaaaaagggagaaaggtaagagggtaggaaagctgttttagctaaatgccacctagagttattggaggtctgaatttggaaaaaaaaactatgtccaggagcagctgtaacctgtagggaaataatggaacaatcatccataagagggatgaacattaagtgtttgaattcatgctctgcttttgtgttactgtaaacacaagatcaagatttggataatctttttcctttgtgtttccaacttagatcatgtctaaatatatgctttcatatggc

SEQ ID NO: 996 - DNA, 2334 bp; single-stranded, linear
  immediate source library: GENBANK
  immediate source clone: g177204
agacacctctgccctcaccatgagcctctggcagcccctggtcctggtgctcctggtgctgggctgctgctttgctgcccccagacagcgccagtccacccttgtgctcttccctggagacctgagaaccaatctcaccgacaggcagctggcagaggaatacctgtaccgctatggttacactcgggtggcagagatgcgtggagagtcgaaatctctggggcctgcgctgctgcttctccagaagcaactgtccctgcccgagaccggtgagctggatagcgccacgctgaaggccatgcgaaccccacggtgcggggtcccagacctgggcagattccaaacctttgagggcgacctcaagtggcaccaccacaacatcacctattggatccaaaactactcggaagacttgccgcgggcggtgattgacgacgcctttgcccgcgccttcgcactgtggagcgcggtgacgccgctcaccttcactcgcgtgtacagccgggacgcagacatcgtcatccagtttggtgtcgcggagcacggagacgggtatcccttcgacgggaaggacgggctcctggcacacgcctttcctcctggccccggcattcagggagacgcccatttcgacgatgacgagttgtggtccctgggcaagggcgtcgtggttccaactcggtttggaaacgcagatggcgcggcctgccacttccccttcatcttcgagggccgctcctactctgcctgcaccaccgacggtcgctccgacggcttgccctggtgcagtaccacggccaactacgacaccgacgaccggtttggcttctgccccagcgagagactctacacccgggacggcaatgctgatgggaaaccctgccagtttccattcatcttccaaggccaatcctactccgcctgcaccacggacggtcgctccgacggctaccgctggtgcgccaccaccgccaactacgaccgggacaagctcttcggcttctgcccgacccgagctgactcgacggtgatggggggcaactcggcgggggagctgtgcgtcttccccttcactttcctgggtaaggagtactcgacctgtaccagcgagggccgcggagatgggcgcctctggtgcgctaccacctcgaactttgacagcgacaagaagtggggcttctgcccggaccaaggatacagtttgttcctcgtggcggcgcatgagttcggccacgcgctgggcttagatcattcctcagtgccggaggcgctcatgtaccctatgtaccgcttcactgaggggccccccttgcataaggacgacgtgaatggcatccggcacctctatggtcctcgccctgaacctgagccacggcctccaaccaccaccacaccgcagcccacggctcccccgacggtctgccccaccggaccccccactgtccacccctcagagcgccccacagctggccccacaggtcccccctcagctggccccacaggtccccccactgctggcccttctacggccactactgtgcctttgagtccggtggacgatgcctgcaacgtgaacatcttcgacgccatcgcggagattgggaaccagctgtatttgttcaaggatgggaagtactggcgattctctgagggcagggggagccggccgcagggccccttccttatcgccgacaagtggcccgcgctgccccgcaagctggactcggtctttgaggagccgctctccaagaagcttttcttcttctctgggcgccaggtgtgggtgtacacaggcgcgtcggtgctgggcccgaggcgtctggacaagctgggcctgggagccgacgtggcccaggtgaccggggccctccggagtggcagggggaagatgctgctgttcagcgggcggcgcctctggaggttcgacgtgaaggcgcagatggtggatccccggagcgccagcgaggtggaccggatgttccccggggtgcctttggacacgcacgacgtcttccagtaccgagagaaagcctatttctgccaggaccgcttctactggcgcgtgagttcccggagtgagttgaaccaggtggaccaagtgggctacgtgacctatgacatcctgcagtgccctgaggactagggctcccgtcctgctttgcagtgccatgtaaatccccactgggaccaaccctggggaaggagccagtttgccggatacaaactggtattctgttctggaggaaagggaggagtggaggtgggctgggccctctcttctcacctttgttttttgttggagtgtttctaataaacttggattctctaaccttt

SEQ ID NO: 997 - DNA, 1494 bp; single-stranded, linear
  immediate source library: GENBANK
  immediate source clone: g1772663
gaagggtgtgcgattgtgtgggacggtctggggcagcccagcagcggctgaccctctgcctgcggggaagggagtcgccaggcggccgtcatggcggtgtcggagagccagctcaagaaaatggtgtccaagtacaaatacagagacctaactgtacgtgaaactgtcaatgttattactctatacaaagatctcaaacctgttttggattcatatgtttttaacgatggcagttccagggaactaatgaacctcactggaacaatccctgtgccttatagaggtaatacatacaatattccaatatgcctatggctactggacacatacccatataatccccctatctgttttgttaagcctactagttcaatgactattaaaacaggaaagcatgttgatgcaaatgggaagatatatcttccttatctacatgaatggaaacacccacagtcagacttgttggggcttattcaggtcatgattgtggtatttggagatgaacctccagtcttctctcgtcctatttcggcatcctatccgccataccaggcaacggggccaccaaatacttcctacatgccaggcatgccaggtggaatctctccatacccatccggataccctcccaatcccagtggttacccaggctgtccttacccacctggtggtccatatcctgccacaacaagttctcagtacccttctcagcctcctgtgaccactgttggtcccagtagggatggcacaatcagcgaggacaccatccgagcctctctcatctctgcggtcagtgacaaactgagatggcggatgaaggaggaaatggatcgtgcccaggcagagctcaatgccttgaaacgaacagaagaagacctgaaaaagggtcaccagaaactggaagagatggttacccgtttagatcaagaagtagccgaggttgataaaaacatagaacttttgaaaaagaaggatgaagaactcagttctgctctggaaaaaatggaaaatcagtctgaaaacaatgatatcgatgaagttatcattcccacagctcccttatacaaacagatcctgaatctgtatgcagaagaaaacgctattgaagacactatcttttacttgggagaagccttgagaaggggcgtgatagacctggatgtcttcctgaagcatgtacgtcttctgtcccgtaaacagttccagctgagggcactaatgcaaaaagcaagaaagactgccggtctcagtgacctctactgacttctctgataccagctggaggttgagctcttcttaaagtattcttctcttccttttatcagtaggtgcccagaataagttattgcagtttatcattcaagtgtaaaatattttgaatcaataatatattttctgttttcttttggtaaagactggcttttattaatgcactttctatcctctgtaaactttttgtgctgaatgttgggactgctaaataaaatttgtttt

SEQ ID NO: 998 - DNA, 675 bp; single-stranded, linear
  immediate source library: GENBANK
  immediate source clone: g1773292
atgcctgggagccctcggcccgcgccaagctgggtgctgttgctgcggctgctggcgttgctgcggcccccggggctgggtgaggcatgcagctgcgccccggcgcaccctcagcagcacatctgccactcggcacttgtgattcgggccaaaatctccagtgagaaggtagttccggccagtgcagaccctgctgacactgaaaaaatgctccggtatgaaatcaaacagataaagatgttcaaagggtttgagaaagtcaaggatgttcagtatatctatacgccttttgactcttccctctgtggtgtgaaactagaagccaacagccagaagcagtatctcttgactggtcaggtcctcagtgatggaaaagtcttcatccatctgtgcaactacatcgagccctgggaggacctgtccttggtgcagagggaaagtctgaatcatcactaccatctgaactgtggctgccaaatcaccacctgctacacagtaccctgtaccatctcggcccctaacgagtgcctctggacagactggctgttggaacgaaagctctatggttaccaggctcagcattatgtctgtatgaagcatgttgacggcacctgcagctggtaccggggccacctgcctctcaggaaggagtttgttgacatcgttcagccctag

SEQ ID NO: 999 - DNA, 696 bp; single-stranded, linear
  immediate source library: GENBANK
  immediate source clone: g178017
ttccccccccccccccccccccccgcccgagcacaggacacagctgggttctgaagcttctgagttctgcagcctcacctctgagaaaacctcttttccaccaataccatgaagctctgcgtgactgtcctgtctctcctcatgctagtagctgccttctgctctccagcgctctcagcaccaatgggctcagaccctcccaccgcctgctgcttttcttacaccgcgaggaagcttcctcgcaactttgtggtagattactatgagaccagcagcctctgctcccagccagctgtggtattccaaaccaaaagaagcaagcaagtctgtgctgatcccagtgaatcctgggtccaggagtacgtgtatgacctggaactgaactgagctgctcagagacaggaagtcttcagggaaggtcacctgagcccggatgcttctccatgagacacatctcctccatactcaggactcctctccgcagttcctgtcccttctcttaatttaatcttttttatgtgccgtgttattgtattaggtgtcatttccattatttatattagtttagccaaaggataagtgtcctatggggatggtccactgtcactgtttctctgctgttgcaaatacatggataacacatttgattctgtgtgttttccataataaaactttaaaataaaatgcagacagtta

SEQ ID NO: 1000 - DNA, 2591 bp; single-stranded, linear
  immediate source library: GENBANK
  immediate source clone: g178083
gcggccgcgtgaggcggaactctgagcaggtggtccattatggctgacatgcaaaatctggtagaaagattggagagggcagtgggccgcctggaggcagtatctcatacctctgacatgcaccgtgggtatgcagacagtccttcaaaagcaggagcagctccatatgtgcaggcatttgactcgctgcttgctggtcctgtggcagagtacttgaagatcagtaaagagattgggggagacgtgcagaaacatgcggagatggtccacacaggtttgaagttggagcgagctctgttggttacagcttctcagtgtcaacagccagcagaaaataagctttccgatttgttggcacccatctcagagcagatcaaagaagtgataacctttcgggagaagaaccgaggcagcaagttgtttaatcacctgtcagctgtcagcgaaagtatccaggccctgggctgggtggctatggctcccaagcctggcccttatgtgaaagaaatgaatgatgccgccatgttttatacaaaccgagtcctcaaagagtacaaagatgtggataagaagcatgtagactgggtcaaagcttatttaagtatatggacagagctgcaggcttacattaaggagttccataccaccggactggcctggagcaaaacggggcctgtggcaaaagaactgagcggactgccatctggaccctctgccggatcaggtcctcctccccctccaccaggcccccctcctcccccagtctctaccagttcaggctcagatgagtctgcttcccgctcagcactgttcgcgcagattaatcagggggagagcattacacatgccctgaaacatgtatctgatgacatgaagactcacaagaaccctgccctgaaggctcagagtggtccagtacgcagtggccccaaaccattctctgcacctaaaccccaaaccagcccatcccccaaacgagccacaaagaaggagccagctgtacttgaactggagggcaagaagtggagagtggaaaatcaggaaaatgtttccaacctggtgattgaggacacagagctgaaacaggtggcttacatatacaagtgtgtcaacacgacattgcaaatcaagggcaaaattaactccattacagtagataactgtaagaaacttggcctggtattcgatgacgtggtgggcattgtggagataatcaacagtaaggatgtcaaagttcaggtaatgggtaaagtgccaaccatatccatcaacaaaacagatggctgccatgcttacctgagcaagaattccctggattgtgaaatagtcagtgccaaatcttccgagatgaatgtcctcattcctacagaaggcggtgactttaatgaattcccagttcctgagcagttcaagaccctatggaacgggcagaagttggtcaccacagtgacagaaattgctggataagcgaagtgccactgggttctttgccctcccttcacaccatgggataaatctgtatcaagacggttcttttctagatttcctctacctttttgctcttaaaactgcttctctgctctgagaagcacagctacctgccttcactgaaatatacctcaggctgagatttggggtgggatagcaggtcagttgatcttctgcaggaaggtgcagcttttccatatcagctcaaccacgccgccagtccattcttaaggaactgccgactaggactgatgatgcattttagctttgagcttttgggggttattctaccaacaaacagtccattggaaagaaaacagtccctggaattaacagatcagaatgttcacactggttaatctttttttaacaatgagcatgaaggtagcagaagctggtgtgtttccagatggttcttctaaccaaactaatttttcactgttgacaagcgaggcaagggttgcactggaccaaaggctgaggcttggccatctagcattccatacaaaattgtttcctataagcattccttttattctctattctatcctgggtctgcctcaaccgtgagataggagagtctctggtactagctgctgtagcagtgcccttcatccagggcagttaatggagtcttggaccctttctttctctgggatccctgcccagcaccttcctatagagatgactttaaaaggaaaaaaaaaaaaaaacccacatgatttcaaggagtctggcattcctgaatccttcttccctgccaggtgcctgtcacctgtcttcactgcctccttttccctgtcatgctcatcagcttatggcttctgtctaagcacctgaacagaggactgaaacctccactgcaggctggttttaggtcttgaattatgtaagaatcttgcacagcactgctaatgtaaatttcagttgtttttccctctaggacaaacacttaccaaaatatgcaacttttttttggtgggaagagagattgtcctgtgatttctacccatttcctgaggcctgtggaaataaacctttatgtacttaaagttatacagaaaatagaataaagttaataccaaacttgaaaaagcggccgc

SEQ ID NO: 1001 - DNA, 1214 bp; single-stranded, linear
  immediate source library: GENBANK
  immediate source clone: g178245
tccctggggctagagcactggacaatggattggcaaggacgcctaccatgggctggctgcactgggagcgcttcatgtgcaaccttgactgccaggaagagccagattcctgcatcagtgagaagctcttcatggagatggcagagctcatggtctcagaaggctggaaggatgcaggttatgagtacctctgcattgatgactgttggatggctccccaaagagattcagaaggcagacttcaggcagaccctcagcgctttcctcatgggattcgccagctagctaattatgttcacagcaaaggactgaagctagggatttatgcagatgttggaaataaaacctgcgcaggcttccctgggagttttggatactacgacattgatgcccagacctttgctgactggggagtagatctgctaaaatttgatggttgttactgtgacagtttggaaaatttggcagatggttataagcacatgtccttggccctgaataggactggcagaagcattgtgtactcctgtgagtggcctctttatatgtggccctttcaaaagcccaattatacagaaatccgacagtactgcaatcactggcgaaattttgctgacattgatgattcctggaaaagtataaagagtatcttggactggacatcttttaaccaggagagaattgttgatgttgctggaccagggggttggaatgacccagatatgttagtgattggcaactttggcctcagctggaatcagcaagtaactcagatggccctctgggctatcatggctgctcctttattcatgtctaatgacctccgacacatcagccctcaagccaaagctctccttcaggataaggacgtaattgccatcaatcaggaccccttgggcaagcaagggtaccagcttagacagggagacaactttgaagtgtgggaacgacctctctcaggcttagcctgggctgtagctatgataaaccggcaggagattggtggacctcgctcttataccatcgcagttgcttccctgggtaaaggagtggcctgtaatcctgcctgcttcatcacacagctcctccctgtgaaaaggaagctagggttctatgaatggacttcaaggttaagaagtcacataaatcccacaggcactgttttgcttcagctagaaaatacaatgcagatgtcattaaaagacttactttaa

SEQ ID NO: 1002 - DNA, 480 bp; single-stranded, linear
  immediate source library: GENBANK
  immediate source clone: g178251
tgcgtgcagacctcggaggaggagtgctcgtccacgctggcagtgtgggtgaagtggcccatccatcccagcgccccagagcttgcgggccacaagagacagtttggctctgtctgccaccagggatcccaggtgtgtgatgagccctcctccgaagaccctcatgagtggccagaagacatcaccaagtggccgatctgcaccaaaaacagcgctgggaaccacaccaaccatccccacatggactgtgtcatcacaggacggccctgctgcattggcaccaagggcaggtgtgagatcacctcccgggagtactgtgacttcatgaggggctacttccatgaggaggccacgctctgctctcaggtgcactgcatggatgatgtgtgtgggctcctgccttttctcaaccccgaggtgcctgaccagttctaccgcctgtggctatccctcttcctgcacgccgggatcttgcactgc

SEQ ID NO: 1003 - DNA, 4020 bp; single-stranded, linear
  immediate source library: GENBANK
  immediate source clone: g178285
gccgagcaccgcgcaccgcgtcatgggggccgcctcgggccgccgggggccggggctgctgctgccgctgccgctgctgttgctgctgccgccgcagcccgccctggcgttggaccccgggctgcagcccggcaacttttctgctgacgaggccggggcgcagctcttcgcgcagagctacaactccagcgccgaacaggtgctgttccagagcgtggccgccagctgggcgcacgacaccaacatcaccgcggagaatgcaaggcgccaggaggaagcagccctgctcagccaggagtttgcggaggcctggggccagaaggccaaggagctgtatgaaccgatctggcagaacttcacggacccgcagctgcgcaggatcatcggagctgtgcgaaccctgggctctgccaacctgcccctggctaagcggcagcagtacaacgccctgctaagcaacatgagcaggatctactccaccgccaaggtctgcctccccaacaagactgccacctgctggtccctggacccagatctcaccaacatcctggcttcctcgcgaagctacgccatgctcctgtttgcctgggagggctggcacaacgctgcgggcatcccgctgaaaccgctgtacgaggatttcactgccctcagcaatgaagcctacaagcaggacggcttcacagacacgggggcctactggcgctcctggtacaactcccccaccttcgaggacgatctggaacacctctaccaacagctagagcccctctacctgaacctccatgccttcgtccgccgcgcactgcatcgccgatacggagacagatacatcaacctcaggggacccatccctgctcatctgctgggagacatgtgggcccagagctgggaaaacatctacgacatggtggtgcctttcccagacaagcccaacctcgatgtcaccagtactatgctgcagcagggctggaacgccacgcacatgttccgggtggcagaggagttcttcacctccctggagctctcccccatgcctcccgagttctgggaagggtcgatgctggagaagccggccgacgggcgggaagtggtgtgccacgcctcggcttgggacttctacaacaggaaagacttcaggatcaagcagtgcacacgggtcacgatggaccagctctccacagtgcaccatgagatgggccatatacagtactacctgcagtacaaggatctgcccgtctccctgcgtcggggggccaaccccggcttccatgaggccattggggacgtgctggcgctctcggtctccactcctgaacatctgcacaaaatcggcctgctggaccgtgtcaccaatgacacggaaagtgacatcaattacttgctaaaaatggcactggaaaaaattgccttcctgccctttggctacttggtggaccagtggcgctggggggtctttagtgggcgtacccccccttcccgctacaacttcgactggtggtatcttcgaaccaagtatcaggggatctgtcctcctgttacccgaaacgaaacccactttgatgctggagctaagtttcatgttccaaatgtgacaccatacatcaggtactttgtgagttttgtcctgcagttccagttccatgaagccctgtgcaaggaggcaggctatgagggcccactgcaccagtgtgacatctaccggtccaccaaggcaggggccaagctccggaaggtgctgcaggctggctcctccaggccctggcaggaggtgctgaaggacatggtcggcttagatgccctggatgcccagccgctgctcaagtacttccagccagtcacccagtggctgcaggagcagaaccagcagaacggcgaggtcctgggctggcccgagtaccagtggcacccgccgttgcctgacaactacccggagggcatagacctggtgactgatgaggctgaggccagcaagtttgtggaggaatatgaccggacatcccaggtggtgtggaacgagtatgccgaggccaactggaactacaacaccaacatcaccacagagaccagcaagattctgctgcagaagaacatgcaaatagccaaccacaccctgaagtacggcacccaggccaggaagtttgatgtgaaccagttgcagaacaccactatcaagcggatcataaagaaggttcaggacctagaacgggcagcgctgcctgcccaggagctggaggagtacaacaagatcctgttggatatggaaaccacctacagcgtggccactgtgtgccacccgaatggcagctgcctgcagctcgagccagatctgacgaatgtgatggccacatcccggaaatatgaagacctgttatgggcatgggagggctggcgagacaaggcggggagagccatcctccagttttacccgaaatacgtggaactcatcaaccaggctgcccggctcaatggctatgtagatgcaggggactcgtggaggtctatgtacgagacaccatccctggagcaagacctggagcggctcttccaggagctgcagccactctacctcaacctgcatgcctacgtgcgccgggccctgcaccgtcactacggggcccagcacatcaacctggaggggcccattcctgctcacctgctggggaacatgtgggcgcagacctggtccaacatctatgacttggtggtgcccttcccttcagccccctcgatggacaccacagaggctatgctaaagcagggctggacgcccaggaggatgtttaaggaggctgatgatttcttcacctccctggggctgctgcccgtgcctcctgagttctggaacaagtcgatgctggagaagccaaccgacgggcgggaggtggtctgccacgcctcggcctgggacttctacaacggcaaggacttccggatcaagcagtgcaccaccgtgaacttggaggacctggtggtggcccaccacgaaatgggccacatccagtatttcatgcagtacaaagacttacctgtggccttgagggagggtgccaaccccggcttccatgaggccattggggacgtgctagccctctcagtgtctacgcccaagcacctgcacagtctcaacctgctgagcagtgagggtggcagcgacgagcatgacatcaactttctgatgaagatggcccttgacaagatcgcctttatccccttcagctacctcgtcgatcagtggcgctggagggtatttgatggaagcatcaccaaggagaactataaccaggagtggtggagcctcaggctgaagtaccagggcctctgccccccagtgcccaggactcaaggtgactttgacccaggggccaagttccacattccttctagcgtgccttacatcaggtactttgtcagcttcatcatccagttccagttccacgaggcactgtgccaggcagctggccacacgggccccctgcacaagtgtgacatctaccagtccaaggaggccgggcagcgcctggcgaccgccatgaagctgggcttcagtaggccgtggccggaagccatgcagctgatcacgggccagcccaacatgagcgcctcggccatgttgagctacttcaagccgctgctggactggctccgcacggagaacgagctgcatggggagaagctgggctggccgcagtacaactggacgccgaactccgctcgctcagaagggcccctcccagacagcggccgcgtcagcttcctgggcctggacctggatgcgcagcaggcccgcgtgggccagtggctgctgctcttcctgggcatcgccctgctggtagccaccctgggcctcagccagcggctcttcagcatccgccaccgcagcctccaccggcactcccacgggccccagttcggctccgaggtggagctgagacactcctgaggtgacccggctgggtcggccctgcccaagggcctcccaccagagactgggatgggaacactggtgggcagctgagg

SEQ ID NO: 1004 - DNA, 1599 bp; single-stranded, linear
  immediate source library: GENBANK
  immediate source clone: g178325
gagactgtgccctgtccacggtgcctcctgcatgtcctgctgccctgagctgtcccgagctaggtgacagcgtaccacgctgccaccatgaatgaggtgtctgtcatcaaagaaggctggctccacaagcgtggtgaatacatcaagacctggaggccacggtacttcctgctgaagagcgacggctccttcattgggtacaaggagaggcccgaggcccctgatcagactctaccccccttaaacaacttctccgtagcagaatgccagctgatgaagaccgagaggccgcgacccaacacctttgtcatacgctgcctgcagtggaccacagtcatcgagaggaccttccacgtggattctccagacgagagggaggagtggatgcgggccatccagatggtcgccaacagcctcaagcagcgggccccaggcgaggaccccatggactacaagtgtggctcccccagtgactcctccacgactgaggagatggaagtggcggtcagcaaggcacgggctaaagtgaccatgaatgacttcgactatctcaaactccttggcaagggaacctttggcaaagtcatcctggtgcgggagaaggccactggccgctactacgccatgaagatcctgcgaaaggaagtcatcattgccaaggatgaagtcgctcacacagtcaccgagagccgggtcctccagaacaccaggcacccgttcctcactgcgctgaagtatgccttccagacccacgaccgcctgtgctttgtgatggagtatgccaacgggggtgagctgttcttccacctgtcccgggagcgtgtcttcacagaggagcgggcccggttttatggtgcagagattgtctcggctcttgagtacttgcactcgcgggacgtggtataccgcgacatcaagctggaaaacctcatgctggacaaagatggccacatcaagatcactgactttggcctctgcaaagagggcatcagtgacggggccaccatgaaaaccttctgtgggaccccggagtacctggcgcctgaggtgctggaggacaatgactatggccgggccgtggactggtgggggctgggtgtggtcatgtacgagatgatgtgcggccgcctgcccttctacaaccaggaccacgagcgcctcttcgagctcatcctcatggaagagatccgcttcccgcgcacgctcagccccgaggccaagtccctgcttgctgggctgcttaagaaggaccccaagcagaggcttggtggggggcccagcgatgccaaggaggtcatggagcacaggttcttcctcagcatcaactggcaggacgtggtccagaagaagctcctgccacccttcaaacctcaggtcacgtccgaggtcgacacaaggtacttcgatgatgaatttaccgcccagtccatcacaatcacaccccctgaccgctatgacagcctgggcttactggagctggaccagcggacccacttcccccagttctcctactcggccagcatccgcgagtgagcagtctgcccacgcagaggacgcacgctcgctgccatcaccgctgggtggttttttacccctgcc

SEQ ID NO: 1005 - DNA, 1636 bp; single-stranded, linear
  immediate source library: GENBANK
  immediate source clone: g178401
ccaggagccccagttaccgggagaggctgtgtcaaaggcgccatgagcaagatcagcgaggccgtgaagcgcgcccgcgccgccttcagctcgggcaggacccgtccgctgcagttccgattccagcagctggaggcgctgcagcgcctgatccaggagcaggagcaggagctggtgggcgcgctggccgcagacctgcacaagaatgaatggaacgcctactatgaggaggtggtgtacgtcctagaggagatcgagtacatgatccagaagctccctgagtgggccgcggatgagcccgtggagaagacgccccagactcagcaggacgagctctacatccactcggagccactgggcgtggtcctcgtcattggcacctggaactaccccttcaacctcaccatccagcccatggtgggcgccatcgctgcagggaacgcagtggtcctcaagccctcggagctgagtgagaacatggcgagcctgctggctaccatcatcccccagtacctggacaaggatctgtacccagtaatcaatgggggtgtccctgagaccacggagctgctcaaggagaggttcgaccatatcctgtacacgggcagcacgggggtggggaagatcatcatgacggctgctgccaagcacctgacccctgtcacgctggagctgggagggaagagtccctgctacgtggacaagaactgtgacctggacgtggcctgccgacgcatcgcctgggggaaattcatgaacagtggccagacctgcgtggccccagactacatcctctgtgacccctcgatccagaaccaaattgtggagaagctcaagaagtcactgaaagagttctacggggaagatgctaagaaatcccgggactatggaagaatcattagtgcccggcacttccagagggtgatgggcctgattgagggccagaaggtggcttatgggggcaccggggatgccgccactcgctacatagcccccaccatcctcacggacgtggacccccagtccccggtgatgcaagaggagatcttcgggcctgtgctgcccatcgtgtgcgtgcgcagcctggaggaggccatccagttcatcaaccagcgtgagaagcccctggccctctacatgttctccagcaacgacaaggtgattaagaagatgattgcagagacatccagtggtggggtggcggccaacgatgtcatcgtccacatcaccttgcactctctgcccttcgggggcgtggggaacagcggcatgggatcctaccatggcaagaagagcttcgagactttctctcaccgccgctcttgcctggtgaggcctctgatgaatgatgaaggcctgaaggtcagataccccccgagcccggccaagatgacccagcactgaggaggggttgctccgcctggcctggccatactgtgtcccatcggagtgcggaccaccctcactggctctcctggccctggagaatcgctcctgcagccccagcccagccccactcctctgctgacctgctgacctgtgcacaccccactcccacatgggcccaggcctcaccattccaagtctccacccctttctagaccaataaagagacaaatacaattttctaactcgg

SEQ ID NO: 1006 - DNA, 3494 bp; single-stranded, linear
  immediate source library: GENBANK
  immediate source clone: g178535
taatttttgcccagtctgcctgttgtggggctcctcccctttggggatataagcccggcctggggctgctccgttctctgcctggcctgaggctccctgagccgcctccccaccatcaccatggccaagggcttctatatttccaagtccctgggcatcctggggatcctcctgggcgtggcagccgtgtgcacaatcatcgcactgtcagtggtgtactcccaggagaagaacaagaacgccaacagctcccccgtggcctccaccaccccgtccgcctcagccaccaccaaccccgcctcggccaccaccttggaccaaagtaaagcgtggaatcgttaccgcctccccaacacgctgaaacccgattcctaccaggtgacgctgagaccgtacctcacccccaatgacaggggcctgtacgtttttaagggctccagcaccgtccgtttcacctgcaaggaggccactgacgtcatcatcatccacagcaagaagctcaactacaccctcagccaggggcacagggtggtcctgcgtggtgtgggaggctcccagccccccgacattgacaagactgagctggtggagcccaccgagtacctggtggtgcacctcaagggctccctggtgaaggacagccagtatgagatggacagcgagttcgagggggagttggcagatgacctggcgggcttctaccgcagcgagtacatggagggcaatgtcagaaaggtggtggccactacacagatgcaggctgcagatgcccggaagtccttcccatgcttcgatgagccggccatgaaggccgagttcaacatcacgcttatccaccccaaggacctgacagccctgtccaacatgcttcccaaaggtcccagcaccccacttccagaagaccccaactggaatgtcactgagttccacaccacgcccaagatgtccacgtacttgctggccttcattgtcagtgagttcgactacgtggagaagcaggcatccaatggtgtcttgatccggatctgggcccggcccagtgccattgcggcgggccacggcgattatgccctgaacgtgacgggccccatccttaacttctttgctggtcattatgacacaccctacccactcccaaaatcagaccagattggcctgccagacttcaacgccggcgccatggagaactggggactggtgacctaccgggagaactccctgctgttcgaccccctgtcctcctccagcagcaacaaggagcgggtggtcactgtgattgctcatgagctggcccaccagtggttcgggaacctggtgaccatagagtggtggaatgacctgtggctgaacgagggcttcgcctcctacgtggagtacctgggtgctgactatgcggagcccacctggaacttgaaagacctcatggtgctgaatgatgtgtaccgcgtgatggcagtggatgcactggcctcctcccacccgctgtccacacccgcctcggagatcaacacgccggcccagatcagtgagctgtttgacgccatctcctacagcaagggcgcctcagtcctcaggatgctctccagcttcctgtccgaggacgtattcaagcagggcctggcgtcctacctccacacctttgcctaccagaacaccatctacctgaacctgtgggaccacctgcaggaggctgtgaacaaccggtccatccaactccccaccaccgtgcgggacatcatgaaccgctggaccctgcagatgggcttcccggtcatcacggtggataccagcacggggaccctttcccaggagcacttcctccttgaccccgattccaatgttacccgcccctcagaattcaactacgtgtggattgtgcccatcacatccatcagagatggcagacagcagcaggactactggctgatagatgtaagagcccagaacgatctcttcagcacatcaggcaatgagtgggtcctgctgaacctcaatgtgacgggctattaccgggtgaactacgacgaagagaactggaggaagattcagactcagctgcagagagaccactcggccatccctgtcatcaatcgggcacagatcattaatgacgccttcaacctggccagtgcccataaggtccctgtcactctggcgctgaacaacaccctcttcctgattgaagagagacagtacatgccctgggaggccgccctgagcagcctgagctacttcaagctcatgtttgaccgctccgaggtctatggccccatgaagaactacctgaagaagcaggtcacacccctcttcattcacttcagaaataataccaacaactggagggagatcccagaaaacctgatggaccagtacagcgaggttaatgccatcagcaccgcctgctccaacggagttccagagtgtgaggagatggtctctggccttttcaagcagtggatggagaaccccaataataacccgatccaccccaacctgcggtccaccgtctactgcaacgctatcgcccagggcggggaggaggagtgggacttcgcctgggagcagttccgaaatgccacactggtcaatgaggctgacaagctccgggcagccctggcctgcagcaaagagttgtggatcctgaacaggtacctgagctacaccctgaacccggacttaatccggaagcaggacgccacctctaccatcatcagcattaccaacaacgtcattgggcaaggtctggtctgggactttgtccagagcaactggaagaagctttttaacgattatggtggtggctcgttctccttctccaacctcatccaggcagtgacacgacgattctccaccgagtatgagctgcagcagctggagcagttcaagaaggacaacgaggaaacaggcttcggctcaggcacccgggccctggagcaagccctggagaagacgaaagccaacatcaagtgggtgaaggagaacaaggaggtggtgctccagtggttcacagaaaacagcaaatagtccccagcccttgaagtcacccggccccgatgcaaggtgcccacatgtgtccatcccagcggctggtgcagggcctccattcctggagcccgaggcaccagtgtcctcccctcaaggacaaagtctccagcccacgttctctctgcctgtgagccagtctagttcctgatgacccaggctgcctgagcacctcccagcccctgcccctcatgccaaccccgccctaggcctggcatggcacctgtcgcccagtgccctggggctgatctcagggaagcccagctccagggccagatgagcagaagctctcgatggacaatgaacggccttgctgggggccgccctgtaccctctttcacctttccctaaagaccctaaatctgaggaatcaacagggcagcagatctgtatatttttttctaagagaaaatgtaaataaaggatttctagatgaaaaaaaaaaaaaaaaa

SEQ ID NO: 1007 - DNA, 1156 bp; single-stranded, linear
  immediate source library: GENBANK
  immediate source clone: g178850
cgcagcggaggtgaaggacgtccttccccaggagccgactggccaatcacaggcaggaagatgaaggttctgtgggctgcgttgctggtcacattcctggcaggatgccaggccaaggtggagcaagcggtggagacagagccggagcccgagctgcgccagcagaccgagtggcagagcggccagcgctgggaactggcactgggtcgcttttgggattacctgcgctgggtgcagacactgtctgagcaggtgcaggaggagctgctcagctcccaggtcacccaggaactgagggcgctgatggacgagaccatgaaggagttgaaggcctacaaatcggaactggaggaacaactgaccccggtggcggaggagacgcgggcacggctgtccaaggagctgcaggcggcgcaggcccggctgggcgcggacatggaggacgtgtgcggccgcctggtgcagtaccgcggcgaggtgcaggccatgctcggccagagcaccgaggagctgcgggtgcgcctcgcctcccacctgcgcaagctgcgtaagcggctcctccgcgatgccgatgacctgcagaagcgcctggcagtgtaccaggccggggcccgcgagggcgccgagcgcggcctcagcgccatccgcgagcgcctggggcccctggtggaacagggccgcgtgcgggccgccactgtgggctccctggccggccagccgctacaggagcgggcccaggcctggggcgagcggctgcgcgcgcggatggaggagatgggcagccggacccgcgaccgcctggacgaggtgaaggagcaggtggcggaggtgcgcgccaagctggaggagcaggcccagcagatacgcctgcaggccgaggccttccaggcccgcctcaagagctggttcgagcccctggtggaagacatgcagcgccagtgggccgggctggtggagaaggtgcaggctgccgtgggcaccagcgccgcccctgtgcccagcgacaatcactgaacgccgaagcctgcagccatgcgaccccacgccaccccgtgcctcctgcctccgcgcagcctgcagcgggagaccctgtccccgccccagccgtcctcctggggtggaccctagtttaataaagattcaccaagtttcacgc

SEQ ID NO: 1008 - DNA, 1885 bp; single-stranded, linear
  immediate source library: GENBANK
  immediate source clone: g178860
cgggcactcaccgtgtgtagttggcatctccgcgcgtccggacacccgatcccagcatccctgcctgcaggactgttcgtgttcagctcgcgtcctgcagctgtccgaggtgctccagttggaggctgaggttcccgggctctgtcgctgagtgggcggcggcaccggcggagatgcctgggaagaaggcgcgcaagaacgctcaaccgagccccgcgcgggctccagcagagctggaagtcgagtgtgctactcaactcaggagatttggagacaaactgaacttccggcagaaacttctgaatctgatatccaaactcttctgctcaggaacctgactgcatcaaaaacttgcatgaggggactccttcaaaagagttttctcaggaggtgcacgtttcatcaatttgaagaaagactgcattgtaattgagaggaatgtgaaggtgcattcatgggtgcccttggaaacggaagatggaatacatcaaagtgaatttctgttcaagttttcccagattatcattctttgggatgagagaacattataaaaccactttgtttattttaaagcaagaatggaagacccttgaaaataaagaagtaattattgacacatttcttttttacttagagaatcgttctagtgtttttgccgaagattaccgctggcctactgtgaaggtagatgacctgtgattagactgggcggctggggagaaacagttcagtgcattgttgttgttgctgtttttggtgttttgcttttcagtgccaactcagcacattgtatatgattcggtttatacatattaccttgttataatgaaaaaactcattctgagaacactgaaatgttatactcagtgttgatttcttcggtcactacacaacgtaaaatcatttgtttcttttgactcaaattgtattgcttctgttcagatgatctttcattcaatgtgttcctgttgggcgttactagaaactatggaaaactggaaaataactttgaaaaaattggataaagtataggagggttacttggggccagtaaatcagtagactgaacattcaatataataaaagaacatggggattttgtataaccagggataataaaaagaaaaagaagttaatttttaattgatgtttttgaaacttagtagaacaaatattcagaagtaacttgataagatatgaatgtttctaaagagtttctaaaggttcgaaatgctccttgtcacattagtgtgcatcctacaaaaagtgatctcttaatgtaaattaagaatattttcataattggaatatacttttcttaaaaaaaaggaacagttagttctcatctagaatgaaagttccatatatgcattggtgaatatatatgtatacacatacttacatacttatatgggtatctgtatagataatttgtattagagtattatatagcttcttagtagggtctcaagtaagttcattttttttatctgggctatatacagtcctcaaataaataatgtcttgattttatttcagcaggaataattttatttattttgcctatttataattaaagtatttttctttagtttgaaatgtgtattaaagttacatttttgagttacaagagtcttataactacttgaatttttagttaaaatgtcttaatgtaggttgtagtcactttagatggaaaattacctcacatctgttttcttcagtattacttaagattgtttatttagtggtagagagattttttttttcagcctagaggcagctattttaccatctggtatttatggtctaatttgtatttaaacatatgcacacatataaaagttgatactgtggcagtaaactattaaaagttttcactgtt

SEQ ID NO: 1009 - DNA, 1445 bp; single-stranded, linear
  immediate source library: GENBANK
  immediate source clone: g178994
tcactgagggttgactgactggagagctcaagtgcagcaaagagaagtgtcagagcatgagcgccaagtccagaaccatagggattattggagctcctttctcaaagggacagccacgaggaggggtggaagaaggccctacagtattgagaaaggctggtctgcttgagaaacttaaagaacaagagtgtgatgtgaaggattatggggacctgccctttgctgacatccctaatgacagtccctttcaaattgtgaagaatccaaggtctgtgggaaaagcaagcgagcagctggctggcaaggtggcacaagtcaagaagaacggaagaatcagcctggtgctgggcggagaccacagtttggcaattggaagcatctctggccatgccagggtccaccctgatcttggagtcatctgggtggatgctcacactgatatcaacactccactgacaaccacaagtggaaacttgcatggacaacctgtatctttcctcctgaaggaactaaaaggaaagattcccgatgtgccaggattctcctgggtgactccctgtatatctgccaaggatattgtgtatattggcttgagagacgtggaccctggggaacactacattttgaaaactctaggcattaaatacttttcaatgactgaagtggacagactaggaattggcaaggtgatggaagaaacactcagctatctactaggaagaaagaaaaggccaattcatctaagttttgatgttgacggactggacccatctttcacaccagctactggcacaccagtcgtgggaggtctgacatacagagaaggtctctacatcacagaagaaatctacaaaacagggctactctcaggattagatataatggaagtgaacccatccctggggaagacaccagaagaagtaactcgaacagtgaacacagcagttgcaataaccttggcttgtttcggacttgctcgggagggtaatcacaagcctattgactaccttaacccacctaagtaaatgtggaaacatccgatataaatctcatagttaatggcataattagaaagctaatcattttcttaagcatagagttatccttctaaagacttgttctttcagaaaaatgtttttccaattagtataaactctacaaattccctcttggtgtaaaattcaagatgtggaaattctaacttttttgaaatttaaaagcttatattttctaacttggcaaaagacttatccttagaaagagaagtgtacattgatttccaattaaaaatttgctggcattaaaaataagcacacttacataagcccccatacatagagtgggactcttggaatcaggagacaaagctaccacatgtggaaaggtactatgtgtccatgtcattcaaaaaatgtgattttttataataaactctttataacaag

SEQ ID NO: 1010 - DNA, 1335 bp; single-stranded, linear
  immediate source library: GENBANK
  immediate source clone: g179035
gagcgcagcagccatggcaagccgtctcctgctcaacaacggcgccaagatgcccatcctggggttgggtacctggaagtcccctccagggcaggtgactgaggccgtgaaggtggccattgacgtcgggtaccgccacatcgactgtgcccatgtgtaccagaatgagaatgaggtgggggtggccattcaggagaagctcagggagcaggtggtgaagcgtgaggagctcttcatcgtcagcaagctgtggtgcacgtaccatgagaagggcctggtgaaaggagcctgccagaagacactcagcgacctgaagctggactacctggacctctaccttattcactggccgactggctttaagcctgggaaggaatttttcccattggatgagtcgggcaatgtggttcccagtgacaccaacattctggacacgtgggcggccatggaagagctggtggatgaagggctggtgaaagctattggcatctccaacttcaaccatctccaggtggagatgatcttaaacaaacctggcttgaagtataagcctgcagttaaccagattgagtgccacccatatctcactcaggagaagttaatccagtactgccagtccaaaggcatcgtggtgaccgcctacagccccctcggctctcctgacaggccctgggccaagcccgaggacccttctctcctggaggatcccaggatcaaggcgatcgcagccaagcacaataaaactacagcccaggtcctgatccggttccccatgcagaggaacttggtggtgatccccaagtctgtgacaccagaacgcattgctgagaactttaaggtctttgactttgaactgagcagccaggatatgaccaccttactcagctacaacaggaactggagggtctgtgccttgttgagctgtacctcccacaaggattaccccttccatgaagagttttgaagctgtggttgcctgctcgtccccaagtgacctatacctgtgtttcttgcctcatttttttccttgcaaatgtagtatggcctgtgtcactcagcagtgggacagcaacctgtagagtggccagcgagggcgtgtctagcttgatgttggatctcaagagccctgtcagtagagtagaagtctcttccagtttgctttgcccttctttctaccctgctggggaaagtacaacctgaatacccttttctgaccaaagagaagcaaaatctaccaggtcaaaatagtgccactaacggttgagttttgactgcttggaactggaatcctttcagcaagacttctctttgcctcaaataaaaagtgcttttgtg

SEQ ID NO: 1011 - DNA, 2373 bp; single-stranded, linear
  immediate source library: GENBANK
  immediate source clone: g179094
gaattcgggcgggggcgccgcccggggccctgagggctggctagggtccaggccgggggggacgggacagacgaaccagccccgtgtaggaagcgcgacaatgccccgctacggagcgtcactccgccagagctgccccaggtccggccgggagcagggacaagacgggaccgccggagcccccggactcctttggatgggcctggtgctggcgctggcgctggcgctggcgctggctctgtctgactctcgggttctctgggctccggcagaggctcaccctctttctccccaaggccatcctgccaggttacatcgcatagtgccccggctccgagatgtctttgggtgggggaacctcacctgcccaatctgcaaaggtctattcaccgccatcaacctcgggctgaagaaggaacccaatgtggctcgcgtgggctccgtggccatcaagctgtgcaatctgctgaagatagcaccacctgccgtgtgccaatccattgtccacctctttgaggatgacatggtggaggtgtggagacgctcagtgctgagcccatctgaggcctgtggcctgctcctgggctccacctgtgggcactgggacattttctcatcttggaacatctctttgcctactgtgccgaagccgccccccaaaccccctagccccccagccccaggtgcccctgtcagccgcatcctcttcctcactgacctgcactgggatcatgactacctggagggcacggaccctgactgtgcagacccactgtgctgccgccggggttctggcctgccgcccgcatcccggccaggtgccggatactggggcgaatacagcaagtgtgacctgcccctgaggaccctggagagcctgttgagtgggctgggcccagccggcccttttgatatggtgtactggacaggagacatccccgcacatgatgtctggcaccagactcgtcaggaccaactgcgggccctgaccaccgtcacagcacttgtgaggaagttcctggggccagtgccagtgtaccctgctgtgggtaaccatgaaagcatacctgtcaatagcttccctccccccttcattgagggcaaccactcctcccgctggctctatgaagcgatggccaaggcttgggagccctggctgcctgccgaagccctgcgcaccctcagaattggggggttctatgctctttccccataccccggtctccgcctcatctctctcaatatgaatttttgttcccgtgagaacttctggctcttgatcaactccacggatcccgcaggacagctccagtggctggtgggggagcttcaggctgctgaggatcgaggagacaaagtgcatataattggccacattcccccagggcactgtctgaagagctggagctggaattattaccgaattgtagccaggtatgagaacaccctggctgctcagttctttggccacactcatgtggatgaatttgaggtcttctatgatgaagagactctgagccggccgctggctgtagccttcctggcacccagtgcaactacctacatcggccttaatcctggttaccgtgtgtaccaaatagatggaaactactccaggagctctcacgtggtcctggaccatgagacctacatcctgaatctgacccaggcaaacataccgggagccataccgcactggcagcttctctacagggctcgagaaacctatgggctgcccaacacactgcctaccgcctggcacaacctggtatatcgcatgcggggcgacatgcaacttttccagaccttctggtttctctaccataagggccacccaccctcggagccctgtggcacgccctgccgtctggctactctttgtgcccagctctctgcccgtgctgacagccctgctctgtgccgccacctgatgccagatgggagcctcccagaggcccagagcctgtggccaaggccactgttttgctagggccccagggcccacatttgggaaagttcttgatgtaggaaagggtgaaaaagcccaaatgctgctgtggttcaaccaggcaagatcatccggtgaaagaaccagtccctgggccccaaggatgccggggaaacaggaccttctcctttcctggagctggtttagctggatatgggagggggtttggctgcctgtgcccaggagctagactgccttgaggctgctgtcctttcacagccatggagtagaggcctaagttgacactgccctgggcagacaagacaggagctgtcgccccaggcctgtgctgcccagccaggaaccctgtactgctgctgcgacctgatgctgccagtctgttaaaataaagcccgcccgaattc

SEQ ID NO: 1012 - DNA, 1510 bp; single-stranded, linear
  immediate source library: GENBANK
  immediate source clone: g179133
acccctaagatgagctttccatgtaaatttgtagccagcttccttctgattttcaatgtttcttccaaaggtgcagtctccaaagagattacgaatgccttggaaacctggggtgccttgggtcaggacatcaacttggacattcctagttttcaaatgagtgatgatattgacgatataaaatgggaaaaaacttcagacaagaaaaagattgcacaattcagaaaagagaaagagactttcaaggaaaaagatacatataagctatttaaaaatggaactctgaaaattaagcatctgaagaccgatgatcaggatatctacaaggtatcaatatatgatacaaaaggaaaaaatgtgttggaaaaaatatttgatttgaagattcaagagagggtctcaaaaccaaagatctcctggacttgtatcaacacaaccctgacctgtgaggtaatgaatggaactgaccccgaattaaacctgtatcaagatgggaaacatctaaaactttctcagagggtcatcacacacaagtggaccaccagcctgagtgcaaaattcaagtgcacagcagggaacaaagtcagcaaggaatccagtgtcgagcctgtcagctgtccagagaaaggtctggacatctatctcatcattggcatatgtggaggaggcagcctcttgatggtctttgtggcactgctcgttttctatatcaccaaaaggaaaaaacagaggagtcggagaaatgatgaggagctggagacaagagcccacagagtagctactgaagaaaggggccggaagccccaccaaattccagcttcaacccctcagaatccagcaacttcccaacatcctcctccaccacctggtcatcgttcccaggcacctagtcatcgtcccccgcctcctggacaccgtgttcagcaccagcctcagaagaggcctcctgctccgtcgggcacacaagttcaccagcagaaaggcccgcccctccccagacctcgagttcagccaaaacctccccatggggcagcagaaaactcattgtccccttcctctaattaaaaaagatagaaactgtatttttcaataaaaagcactgtggatttctgccctcctgatgtgcatatccgtacttccatgaggtgttttctgtgtgcagaacattgtcacctcctgaggctgtgggccacagccacctctgcatcttcgaactcagccatgtggtcaacatctggagtttttggtctcctcagagagctccatcacaccagtaaggagaagcaatataagtgtgattgcaagaatggtagaggaccgagcacagaaatcttagagatttcctgtcccctctcaggtcatgtgtagatgcgataaatcaagtgattggtgtgcctgggtctcactacaagcagcctatctgcttaagagactctggagtttcttatgtgccctggtggacacttgcccaccatcctgtgagtaaaagtgaaataaaagctttgactag

SEQ ID NO: 1013 - DNA, 1742 bp; single-stranded, linear
  immediate source library: GENBANK
  immediate source clone: g179143
caagcccagagccctgccatttctgtgggctcaggtccctactgctcagccccttcctccctcggcaaggccacaatgaaccggggagtcccttttaggcacttgcttctggtgctgcaactggcgctcctcccagcagccactcagggaaagaaagtggtgctgggcaaaaaaggggatacagtggaactgacctgtacagcttcccagaagaagagcatacaattccactggaaaaactccaaccagataaagattctgggaaatcagggctccttcttaactaaaggtccatccaagctgaatgatcgcgctgactcaagaagaagcctttgggaccaaggaaacttccccctgatcatcaagaatcttaagatagaagactcagatacttacatctgtgaagtggaggaccagaaggaggaggtgcaattgctagtgttcggattgactgccaactctgacacccacctgcttcaggggcagagcctgaccctgaccttggagagcccccctggtagtagcccctcagtgcaatgtaggagtccaaggggtaaaaacatacagggggggaagaccctctccgtgtctcagctggagctccaggatagtggcacctggacatgcactgtcttgcagaaccagaagaaggtggagttcaaaatagacatcgtggtgctagctttccagaaggcctccagcatagtctataagaaagagggggaacaggtggagttctccttcccactcgcctttacagttgaaaagctgacgggcagtggcgagctgtggtggcaggcggagagggcttcctcctccaagtcttggatcacctttgacctgaagaacaaggaagtgtctgtaaaatgggttacccaggaccctaagctccagatgggcaagaagctcccgctccacctcaccctgccccaggccttgcctcagtatgctggctctggaaacctcaccctggcccttgaagcgaaaacaggaaagttgcatcaggaagtgaacctggtggtgatgagagccactcagctccagaaaaatttgacctgtgaggtgtggggacccacctcccctaagctgatgctgagcttgaaactggagaacaaggaggcaaaggtctcgaagcgggagaaggcggtgtgggtgctgaaccctgaggcggggatgtggcagtgtctgctgagtgactcgggacaggtcctgctggaatccaacatcaaggttctgcccacatggtccaccccggtgcagccaatggccctgattgtgctggggggcgtcgccggcctcctgcttttcattgggctaggcatcttcttctgtgtcaggtgccggcaccgaaggcgccaagcagagcggatgtctcagatcaagagactcctcagtgagaagaagacctgccagtgccctcaccggtttcagaagacatgtagccccatttgaggcacgaggccaggcagatcccacttgcagcctccccaggtgtctgccccgcgtttcctgcctgcggaccagatgaatgtagcagatcccacgctctggcctcctgttcgtcctccctacaatttgccattgtttctcctgggttaggccccggcttcactggttgagtgttgctctctagtttccagaggcttaatcacaccgtcctccacgccatttccttttccttcaagcctagcccttctctcattatttctctctgaccctctccccactgctcatttggatcc

SEQ ID NO: 1014 - DNA, 1060 bp; single-stranded, linear
  immediate source library: GENBANK
  immediate source clone: g179145
cggctcccgcgccgcctcccctcgcgcccgagcttcgagccaagcagcgtcctggggagcgcgtcatggccttaccagtgaccgccttgctcctgccgctggccttgctgctccacgccgccaggccgagccagttccgggtgtcgccgctggatcggacctggaacctgggcgagacagtggagctgaagtgccaggtgctgctgtccaacccgacgtcgggctgctcgtggctcttccagccgcgcggcgccgccgccagtcccaccttcctcctatacctctcccaaaacaagcccaaggcggccgaggggctggacacccagcggttctcgggcaagaggttgggggacaccttcgtcctcaccctgagcgacttccgccgagagaacgagggctactatttctgctcggccctgagcaactccatcatgtacttcagccacttcgtgccggtcttcctgccagcgaagcccaccacgacgccagcgccgcgaccaccaacaccggcgcccaccatcgcgtcgcagcccctgtccctgcgcccagaggcgtgccggccagcggcggggggcgcagtgcacacgagggggctggacttcgcctgtgatatctacatctgggcgcccttggccgggacttgtggggtccttctcctgtcactggttatcaccctttactgcaaccacaggaaccgaagacgtgtttgcaaatgtccccggcctgtggtcaaatcgggagacaagcccagcctttcggcgagatacgtctaaccctgtgcaacagccactacattacttcaaactgagatccttccttttgagggagcaagtccttccctttcattttttccagtcttcctccctgtgtattcattctcatgattattattttagtgggggcggggtgggaaagattactttttctttatgtgtttgacgggaaacaaaactaggtaaaatctacagtacaccacaagggtcacaatactgttgtgcgcacatcgcggtagggcgtggaaaggggcaggccagagctacccgcagagttctcagaatca

SEQ ID NO: 1015 - DNA, 6030 bp; single-stranded, linear
  immediate source library: GENBANK
  immediate source clone: g179370
gttggcccccgttacttttcctctgggaaatatggcgcacgctgggagaacagggtacgataaccgggagatagtgatgaagtacatccattataagctgtcgcagaggggctacgagtgggatgcgggagatgtgggcgccgcgcccccgggggccgcccccgcgccgggcatcttctcctcgcagcccgggcacacgccccatacagccgcatcccgggacccggtcgccaggacctcgccgctgcagaccccggctgcccccggcgccgccgcggggcctgcgctcagcccggtgccacctgtggtccacctgaccctccgccaggccggcgacgacttctcccgccgctaccgccgcgacttcgccgagatgtccaggcagctgcacctgacgcccttcaccgcgcggggacgctttgccacggtggtggaggagctcttcagggacggggtgaactgggggaggattgtggccttctttgagttcggtggggtcatgtgtgtggagagcgtcaaccgggagatgtcgcccctggtggacaacatcgccctgtggatgactgagtacctgaaccggcacctgcacacctggatccaggataacggaggctgggatgcctttgtggaactgtacggccccagcatgcggcctctgtttgatttctcctggctgtctctgaagactctgctcagtttggccctggtgggagcttgcatcaccctgggtgcctatctgggccacaagtgaagtcaacatgcctgccccaaacaaatatgcaaaaggttcactaaagcagtagaaataatatgcattgtcagtgatgttccatgaaacaaagctgcaggctgtttaagaaaaaataacacacatataaacatcacacacacagacagacacacacacacacaacaattaacagtcttcaggcaaaacgtcgaatcagctatttactgccaaagggaaatatcatttattttttacattattaagaaaaaaagatttatttatttaagacagtcccatcaaaactcctgtctttggaaatccgaccactaattgccaagcaccgcttcgtgtggctccacctggatgttctgtgcctgtaaacatagattcgctttccatgttgttggccggatcaccatctgaagagcagacggatggaaaaaggacctgatcattggggaagctggctttctggctgctggaggctggggagaaggtgttcattcacttgcatttctttgccctgggggctgtgatattaacagagggagggttcctgtggggggaagtccatgcctccctggcctgaagaagagactctttgcatatgactcacatgatgcatacctggtgggaggaaaagagttgggaacttcagatggacctagtacccactgagatttccacgccgaaggacagcgatgggaaaaatgcccttaaatcataggaaagtatttttttaagctaccaattgtgccgagaaaagcattttagcaatttatacaatatcatccagtaccttaagccctgattgtgtatattcatatattttggatacgcaccccccaactcccaatactggctctgtctgagtaagaaacagaatcctctggaacttgaggaagtgaacatttcggtgacttccgcatcaggaaggctagagttacccagagcatcaggccgccacaagtgcctgcttttaggagaccgaagtccgcagaacctgcctgtgtcccagcttggaggcctggtcctggaactgagccggggccctcactggcctcctccagggatgatcaacagggcagtgtggtctccgaatgtctggaagctgatggagctcagaattccactgtcaagaaagagcagtagaggggtgtggctgggcctgtcaccctggggccctccaggtaggcccgttttcacgtggagcatgggagccacgacccttcttaagacatgtatcactgtagagggaaggaacagaggccctgggcccttcctatcagaaggacatggtgaaggctgggaacgtgaggagaggcaatggccacggcccattttggctgtagcacatggcacgttggctgtgtggccttggcccacctgtgagtttaaagcaaggctttaaatgactttggagagggtcacaaatcctaaaagaagcattgaagtgaggtgtcatggattaattgacccctgtctatggaattacatgtaaaacattatcttgtcactgtagtttggttttatttgaaaacctgacaaaaaaaaagttccaggtgtggaatatgggggttatctgtacatcctggggcattaaaaaaaaaatcaatggtggggaactataaagaagtaacaaaagaagtgacatcttcagcaaataaactaggaaatttttttttcttccagtttagaatcagccttgaaacattgatggaataactctgtggcattattgcattatataccatttatctgtattaactttggaatgtactctgttcaatgtttaatgctgtggttgatatttcgaaagctgctttaaaaaaatacatgcatctcagcgtttttttgtttttaattgtatttagttatggcctatacactatttgtgagcaaaggtgatcgttttctgtttgagatttttatctcttgattcttcaaaagcattctgagaaggtgagataagccctgagtctcagctacctaagaaaaacctggatgtcactggccactgaggagctttgtttcaaccaagtcatgtgcatttccacgtcaacagaattgtttattgtgacagttatatctgttgtccctttgaccttgtttcttgaaggtttcctcgtccctgggcaattccgcatttaattcatggtattcaggattacatgcatgtttggttaaacccatgagattcattcagttaaaaatccagatggcaaatgaccagcagattcaaatctatggtggtttgacctttagagagttgctttacgtggcctgtttcaacacagacccacccagagccctcctgccctccttccgcgggggctttctcatggctgtccttcagggtcttcctgaaatgcagtggtgcttacgctccaccaagaaagcaggaaacctgtggtatgaagccagacctccccggcgggcctcagggaacagaatgatcagacctttgaatgattctaatttttaagcaaaatattattttatgaaaggtttacattgtcaaagtgatgaatatggaatatccaatcctgtgctgctatcctgccaaaatcattttaatggagtcagtttgcagtatgctccacgtggtaagatcctccaagctgctttagaagtaacaatgaagaacgtggacgcttttaatataaagcctgttttgtcttctgttgttgttcaaacgggattcacagagtatttgaaaaatgtatatatattaagaggtcacgggggctaattgctggctggctgccttttgctgtggggttttgttacctggttttaataacagtaaatgtgcccagcctcttggccccagaactgtacagtattgtggctgcacttgctctaagagtagttgatgttgcattttccttattgttaaaaacatgttagaagcaatgaatgtatataaaagcctcaactagtcatttttttctcctcttcttttttttcattatatctaattattttgcagttgggcaacagagaaccatccctattttgtattgaagagggattcacatctgcatcttaactgctctttatgaatgaaaaaacagtcctctgtatgtactcctctttacactggccagggtcagagttaaatagagtatatgcactttccaaattggggacaagggctctaaaaaaagccccaaaaggagaagaacatctgagaacctcctcggccctcccagtccctcgctgcacaaatactccgcaagagaggccagaatgacagctgacagggtctatggccatcgggtcgtctccgaagatttggcaggggcagaaaactctggcaggcttaagatttggaataaagtcacagaatcaaggaagcacctcaatttagttcaaacaagacgccaacattctctccacagctcacttacctctctgtgttcagatgtggccttccatttatatgtgatctttgttttattagtaaatgcttatcatctaaagatgtagctctggcccagtgggaaaaattaggaagtgattataaatcgagaggagttataataatcaagattaaatgtaaataatcagggcaatcccaacacatgtctagctttcacctccaggatctattgagtgaacagaattgcaaatagtctctatttgtaattgaacttatcctaaaacaaatagtttataaatgtgaacttaaactctaattaattccaactgtacttttaaggcagtggctgtttttagactttcttatcacttatagttagtaatgtacacctactctatcagagaaaaacaggaaaggctcgaaatacaagccattctaaggaaattagggagtcagttgaaattctattctgatcttattctgtggtgtcttttgcagcccagacaaatgtggttacacactttttaagaaatacaattctacattgtcaagcttatgaaggttccaatcagatctttattgttattcaatttggatctttcagggattttttttttaaattattatgggacaaaggacatttgttggaggggtgggagggaggaacaatttttaaatataaaacattcccaagtttggatcagggagttggaagttttcagaataaccagaactaagggtatgaaggacctgtattggggtcgatgtgatgcctctgcgaagaaccttgtgtgacaaatgagaaacattttgaagtttgtggtacgacctttagattccagagacatcagcatggctcaaagtgcagctccgtttggcagtgcaatggtataaatttcaagctggatatgtctaatgggtatttaaacaataaatgtgcagttttaactaacaggatatttaatgacaaccttctggttggtagggacatctgtttctaaatgtttattatgtacaatacagaaaaaaattttataaaattaagcaatgtgaaactgaattggagagtgataatacaagtcctttagtcttacccagtgaatcattctgttccatgtctttggacaaccatgaccttggacaatcatgaaatatgcatctcactggatgcaaagaaaatcagatggagcatgaatggtactgtaccggttcatctggactgccccagaaaaataacttcaagcaaacatcctatcaacaacaaggttgttctgcataccaagctgagcacagaagatgggaacactggtggaggatggaaaggctcgctcaatcaagaaaattctgagactattaataaataagactgtagtgtagatactgagtaaatccatgcacctaaaccttttggaaaatctgccgtgggccctccagatagctcatttcattaagtttttccctccaaggtagaatttgcaagagtgacagtggattgcatttcttttggggaagctttcttttggtggttttgtttattataccttcttaagttttcaaccaaggtttgcttttgttttgagttactggggttatttttgttttaaataaaaataagtgtacaataagtgtttttgtattgaaagcttttgttatcaagattttcatacttttaccttccatggctctttttaagattgatacttttaagaggtggctgatattctgcaacactgtacacataaaaaatacggtaaggatactttacatggttaaggtaaagtaagtctccagttggccaccattagctataatggcactttgtttgtgttgttggaaaaagtcacattgccattaaactttccttgtctgtctagttaatattgtgaagaaaaataaagtacagtgtgagatactg

SEQ ID NO: 1016 - DNA, 1557 bp; single-stranded, linear
  immediate source library: GENBANK
  immediate source clone: g179410
gtgaggaatgctctgtgccagaaacagtgggagccctgaccttggctgactggggctggggtgagagaggaaagacctacattccctctcctgcccagatgccctttggaaagccattgaccacccaccatattgtttgatctacttcatagctccttggagcagccaaaaaagggacagcatgccccttggctggatcagggaatccagctccctagactgcatcccgtacctcttcccatgactgcacccagctccaggggcccttgggacagccagagctgggtggggacagtgataggcccaaggtcccctccacatcccagcagcccaagcttaatagccctccccctcaacctcaccattgtgaagcacctactatgtgctgggtgcctcccacacttgctggggctcacggggcctccaacccatttaatcaccatgggaaactgttgtgggcgctgcttccaggataaggagactgaggcttagagagaggaggcagccccctccacaccagtggcctcgtggttattagcaaggctgggtaatgtgaaggcccaagagcagagtctgggcctctgactctgagtccactgctccatttataaccccagcctgacctgagactgtcggagaggctgtctggggcctttatcaaaaaaagactcagccaagacaaggaggtagagaggggactgggggactgggagtcagagccctggctgggttcaggtcccacgtctggccaggcactgccttctcctctctgggcctttgtttccttgttggtcagaggagtgattgaaccagctcatctccaaggatcctctccactccatgtttgcaatgcttttatatggcccagccttgtaaataaccacaaggtccactccctgctccacgaagccttaagccataggcccaggatatttctgagagtgaaaccatgactgtgaccaccttctgtccccagccctgtcctggttccttcctatgcccaggtaccacccttcagaccccagttctaggggagaagagccctggacacccctgctctacccatgagcctgcccgctgcaatgcctagacttcccaacagccttagctgccagtgctggtcactaaccaacaaggttggcaccccagctaccccttctttgcagggctaaggcccccaaacatagcccctgccccggaggaagcttggggaacccatgagttgtcagctttgactttatctcctgctctttctacatgactgggcctcccttgggctggaagaattggggattctctattggaggtgagatcacagcctccagggccccccaaatcccagggaaggacttggagagaatcatgctgttgcatttagaactttctgctttgcacaggaaagagtcacacaattaatcaacatgtatattttctctatacatagagctctatttctctacggttttataaaagccttgggttccaaccaggcagtagatgtgcttctgaaccgcaaggagcaaacactgaaataaaatagtttatttttcacactca

SEQ ID NO: 1017 - DNA, 1813 bp; single-stranded, linear
  immediate source library: GENBANK
  immediate source clone: g179528
caggccttgaggttttggcagctctggaggatgagagagaacatggccaggggcccttgcaacgcgccgagatgggtgtccctgatggtgctcgtcgccataggcaccgccgtgacagcggccgtcaaccctggcgtcgtggtcaggatctcccagaagggcctggactacgccagccagcaggggacggccgctctgcagaaggagctgaagaggatcaagattcctgactactcagacagctttaagatcaagcatcttgggaaggggcattatagcttctacagcatggacatccgtgaattccagcttcccagttcccagataagcatggtgcccaatgtgggccttaagttctccatcagcaacgccaatatcaagatcagcgggaaatggaaggcacaaaagagattcttaaaaatgagcggcaattttgacctgagcatagaaggcatgtccatttcggctgatctgaagctgggcagtaaccccacgtcaggcaagcccaccatcacctgctccagctgcagcagccacatcaacagtgtccacgtgcacatctcaaagagcaaagtcgggtggctgatccaactcttccacaaaaaaattgagtctgcgcttcgaaacaagatgaacagccaggtctgcgagaaagtgaccaattctgtatcctccaagctgcaaccttatttccagactctgccagtaatgaccaaaatagattctgtggctggaatcaactatggtctggtggcacctccagcaaccacggctgagaccctggatgtacagatgaagggggagttttacagtgagaaccaccacaatccacctccctttgctccaccagtgatggagtttcccgctgcccatgaccgcatggtatacctgggcctctcagactacttcttcaacacagccgggcttgtataccaagaggctggggtcttgaagatgacccttagagatgacatgattccaaaggagtccaaatttcgactgacaaccaagttctttggaaccttcctacctgaggtggccaagaagtttcccaacatgaagatacagatccatgtctcagcctccaccccgccacacctgtctgtgcagcccaccggccttaccttctaccctgccgtggatgtccaggcctttgccgtcctccccaactcctccctggcttccctcttcctgattggcatgcacacaactggttccatggaggtcagcgccgagtccaacaggcttgttggagagctcaagctggataggctgctcctggaactgaagcactcaaatattggccccttcccggttgaattgctgcaggatatcatgaactacattgtacccattcttgtgctgcccagggttaacgagaaactacagaaaggcttccctctcccgacgccggccagagtccagctctacaacgtagtgcttcagcctcaccagaacttcctgctgttcggtgcagacgttgtctataaatgaaggcaccaggggtgccgggggctgtcagccgcacctgttcctgatgggctgtggggcaccggctgcctttccccagggaatcctctccagatcttaaccaagagccccttgcaaacttcttcgactcagattcagaaatgatctaaacacgaggaaacattattcattggaaaagtgcatggtgtgtattttagggattatgagcttctttcaagggctaaggctgcagagatatttcctccaggaatcgtgtttcaattgtaaccaagaaatttccatttgtgcttcatgaaaaaaaacttctggtttttttcatgtg

SEQ ID NO: 1018 - DNA, 2328 bp; single-stranded, linear
  immediate source library: GENBANK
  immediate source clone: g179699
agggggagcccaggagaccagaacatgaactccttcaattataccacccctgattatgggcactatgatgacaaggataccctggacctcaacacccctgtggataaaacttctaacacgctgcgtgttccagacatcctggccttggtcatctttgcagtcgtcttcctggtgggagtgctgggcaatgccctggtggtctgggtgacggcattcgaggccaagcggaccatcaatgccatctggttcctcaacttggcggtagccgacttcctctcctgcctggcgctgcccatcttgttcacgtccattgtacagcatcaccactggccctttggcggggccgcctgcagcatcctgccctccctcatcctgctcaacatgtacgccagcatcctgctcctggccaccatcagcgccgaccgctttctgctggtgtttaaacccatctggtgccagaacttccgaggggccggcttggcctggatcgcctgtgccgtggcttggggtttagccctgctgctgaccataccctccttcctgtaccgggtggtccgggaggagtactttccaccaaaggtgttgtgtggcgtggactacagccacgacaaacggcgggagcgagccgtggccatcgtccggctggtcctgggcttcctgtggcctctactcacgctcacgatttgttacactttcatcctgctccggacgtggagccgcagggccacgcggtccaccaagacactcaaggtggtggtggcagtggtggccagtttctttatcttctggttgccctaccaggtgacggggataatgatgtccttcctggagccatcgtcacccaccttcctgctgctgaataagctggactccctgtgtgtctcctttgcctacatcaactgctgcatcaaccccatcatctacgtggtggccggccagggcttccagggccgactgcggaaatccctccccagcctcctccggaacgtgttgactgaagagtccgtggttagggagagcaagtcattcacgcgctccacagtggacactatggcccagaagacccaggcagtgtaggcgacagcctcatgggccactgtggcccgatgtccccttccttcccggccattctccctcttgttttcacttcacttttcgtgggatggtgttaccttagctaactaactctcctccatgttgcctgtctttcccagacttgtccctccttttccagcgggactcttctcatccttcctcatttgcaaggtgaacacttccttctagggagcaccctcccaccccccacccccccccacacaccatctttccatcccaggcttttgaaaaacaaacagaaacccgtgtatctgggatatttccatatggcaataggtgtgaacagggaactcagaatacagacaagtagaaagattctcgcttaaaaaaatgtatttattttatggcaagttggaaaatatgtaactggaatctcaaaagttctttgggacaaaacagaagtccatggagttatctaagctcttgtaagtgagttaatttaaaaaagaaaattaggctgagagcagtggctcacgcctgtaatcccagaactttgggaggctaaggtgggtggatcacctgaggtcaagagttccagaccaggctggccagcatggtgaaaccccgtctgtactaaaaatacaaaaaattaactgggcatggtagtgggtgcctgtaatcccagctacttgggaggctgaggtgggagaattgctcgaaccttggaggtggaggttgtggtgagccatgatcgcaccactgcactctagcctgggtgaccgagggaggctctgtctcaaaagcaaagcaaaaacaaaaacaaaaacacctaaaaaacctgcagttttgtttgtactttgtttttaaattatgctttctattttgagatcattgcaaactcaacacaattgtaagtaatgatacagagggatcttgtgtacccttcacccagcctcccccaatggcaacatcttgcaaaactacaatgtagtctcataaccaggatattgacattgatacagtgaagatacaggacattctcatcaccacagggatccccaggatgcccacttccctccacccccacaccccagccgtgtccctaacccctggcaaccaggaatccactctccatttctataatgttgtcatttcaagaatgttattcaatggaatcatatagtatgtaacctgttttgagcttaaaaaaaaaagtatacatgactttaatgaggaaaataaaaatgaatattgaaaaaaaaaactttagag

SEQ ID NO: 1019 - DNA, 5508 bp; single-stranded, linear
  immediate source library: GENBANK
  immediate source clone: g179833
gattttaggtgatgggcaagtcagaaagtcagatggatataactgatatcaacactccaaagccaaagaagaaacagcgatggactcgactggagatcagcctctcggtccttgtcctgctcctcaccatcatagctgtgagaatgatcgcactctatgcaacctacgatgatggtatttgcaagtcatcagactgcataaaatcagctgctcgactgatccaaaacatggatgccaccactgagccttgtagagactttttcaaatatgcttgcggaggctggttgaaacgtaatgtcattcccgagaccagctcccgttacggcaactttgacattttaagagatgaactagaagtcgttttgaaagatgtccttcaagaacccaaaactgaagatatagtagcagtgcagaaagcaaaagcattgtacaggtcttgtataaatgaatctgctattgatagcagaggtggagaacctctactcaaactgttaccagacatatatgggtggccagtagcaacagaaaactgggagcaaaaatatggtgcttcttggacagctgaaaaagctattgcacaactgaattctaaatatgggaaaaaagtccttattaatttgtttgttggcactgatgataagaattctgtgaatcatgtaattcatattgaccaacctcgacttggcctcccttctagagattactatgaatgcactggaatctataaagaggcttgtacagcatatgtggattttatgatttctgtggccagattgattcgtcaggaagaaagattgcccatcgatgaaaaccagcttgctttggaaatgaataaagttatggaattggaaaaagaaattgccaatgctacggctaaacctgaagatcgaaatgatccaatgcttctgtataacaagatgagattggcccagatccaaaataacttttcactagagatcaatgggaagccattcagctggttgaatttcacaaatgaaatcatgtcaactgtgaatattagtattacaaatgaggaagatgtggttgtttatgctccagaatatttaaccaaacttaagcccattcttaccaaatattctgccagagatcttcaaaatttaatgtcctggagattcataatggatcttgtaagcagcctcagccgaacctacaaggagtccagaaatgctttccgcaaggccctttatggtacaacctcagaaacagcaacttggagacgttgtgcaaactatgtcaatgggaatatggaaaatgctgtggggaggctttatgtggaagcagcatttgctggagagagtaaacatgtggtcgaggatttgattgcacagatccgagaagtttttattcagactttagatgacctcacttggatggatgccgagacaaaaaagagagctgaagaaaaggccttagcaattaaagaaaggatcggctatcctgatgacattgtttcaaatgataacaaactgaataatgagtacctcgagttgaactacaaagaagatgaatacttcgagaacataattcaaaatttgaaattcagccaaagtaaacaactgaagaagctccgagaaaaggtggacaaagatgagtggataagtggagcagctgtagtcaatgcattttactcttcaggaagaaatcagatagtcttcccagccggcattctgcagccccccttctttagtgcccagcagtccaactcattgaactatgggggcatcggcatggtcataggacacgaaatcacccatggcttcgatgacaatggcagaaactttaacaaagatggagacctcgttgactggtggactcaacagtctgcaagtaactttaaggagcaatcccagtgcatggtgtatcagtatggaaacttttcctgggacctggcaggtggacagcaccttaatggaattaatacactgggagaaaacattgctgataatggaggtcttggtcaagcatacagagcctatcagaattatattaaaaagaatggcgaagaaaaattacttcctggacttgacctaaatcacaaacaactatttttcttgaactttgcacaggtgtggtgtggaacctataggccagagtatgcggttaactccattaaaacagatgtgcacagtccaggcaatttcaggattattgggactttgcagaactctgcagagttttcagaagcctttcactgccgcaagaattcatacatgaatccagaaaagaagtgccgggtttggtgatcttcaaaagaagcattgcagcccttggctagacttgccaacaccacagaaatggggaattctctaatcgaaagaaaatgggccctaggggtcactgtactgacttgagggtgattaacagagagggcaccatcacaatacagataacattaggttgtcctagaaagggtgtggagggaggaagggggtctaaggtctatcaagtcaatcatttctcactgtgtacataatgcttaatttctaaagataatattactgtttatttctgtttctcatatggtctaccagtttgctgatgtccctagaaaacaatgcaaaacctttgaggtagaccaggatttctaatcaaaagggaaaagaagatgttgaagaatagagttaggcaccagaagaagagtaggtgacactatagtttaaaacacattgcctaactactagtttttacttttatttgcaacatttacagtccttcaaaatccttccaaagaattcttatacacattggggccttggagcttacatagttttaaactcatttttgccatacatcagttattcattctgtgatcatttattttaagcactcttaaagcaaaaaatgaatgtctaaaattgttttttgttgtacctgctttgactgatgctgagattcttcaggcttcctgcaattttctaagcaatttcttgctctatctctcaaaacttggtatttttcagagatttatataaatgtaaaaataataatttttatatttaattattaactacatttatgagtaactattattataggtaatcaatgaatattgaagtttcagcttaaaataaacagttgtgaaccaagatctataaagcgatatacagatgaaaatttgagactatttaaacttataaatcatattgatgaaaagatttaagcacaaactttagggtaaaaattgcgattggacagttgtctagagatatatatacttgtggttttcaaattggactttcaaaattaaatctgtccctgagagtgtctctgataaaagggcaaatctgcacctatgtagctctgcatctcctgtcttttcaggtttgtcatcagatggaaatattttgataataaattgaaattgtgaactcattgctccctaagactgtgacaactgtctaactttagaagtgcatttctgaatagaaatgggaggcctctgatggaccttctagaattataagtcacaaagagttctggaaaagaactgtttactgcttgataggaattcatcttttgaggcttctgttcctctcttttcctgttgtattgactattttcgttcattacttgattaagattttacaaaagaggagcacttccaaaattcttatttttcctaacaaaagatgaaagcagggaatttctatctaaatgatgagtattagttccctgtctcttgaaaaatgcccatttgcctttaaaaaaaaaagttacagaaatactataacatatgtacataaattgcataaagcataagtatacagttcaataaacttaactttaactgaacaatggccctgtagccagcacctgtaagaaacagagcagtaccagcgctctaaaagcacctccttgtcactttattactcccagaacaacaactatcctgacttctaatatcattcactagctttgcctggttttgtcttttatgcagatagaatcaatcagtatgtattcttttgtgcctggcttctttctctcagccttacatttgtgagattcctctgtattgtgctgattgtggatcttttcattctcattgcagaataatgttctattgtgggacttattacaatttgttcatcctattgttgatgggcacttgagaactttccattttggcgctattacaaatagtgcaactatgaatgtactgcatgttaccatcttacttgagcctttaatggacttatttcttcaaatccttccaaaaattattataagcattgaaattatagtttcaagccaactgtggatacccttaccctttcctcctttatcacaaccaccgttacaagtatacttatatttccctaaaatacatttaaaacttacctaagtgacatttgtagttggagtaataggagcttccagctctaataaaacagctgtctctaacttattttatttccatcatgtcagagcaggtgaagagccagaagtgaagagtgactagtacaaattataaaaagccactagactcttcactgttagctttttaaaacattaggctcccatccctatggaggaacaactctccagtgcctggatcccctctgtctacaaatataagattttctgggcctaaaggatagatcaaagtcaaaaatagcaatgcctccctatccctcacacatccagacatcatgaattttacatggtactcttgttgagttctatagagccttctgatgtctctaaagcactaccgattctttggagttgtcacatcagataagacatatctctaattccatccataaatccagttctactatggctgagttctggtcaaagaaagaaagtttagaagctgagacacaaagggttgggagctgatgaaactcacaaatgatggtaggaagaagctctcgacaatacccgttggcaaggagtctgcctccatgctgcagtgttcgagtggattgtaggtgcaagatggaaaggattgtaggtgcaagctgtccagagaaaagagtccttgttccagccctattctgccactcctgacagggtgaccttgggtatttgcaatattcctttgggcctctgcttctctcacctaaaaaaagagaattagattatattggtggttctcagcaagagaaggagtatgtgtccaatgctgccttcccatgaatctgtctcccagttatgaatcagtgggcaggataaactgaaaactcccatttaagtgtctgaatcgagtgagacaaaattttagtccaaataacaagtaccaaagttttatcaagtttgggtctgtgctgctgttactgttaaccatttaagtggggcaaaaccttgctaattttctcaaaagcatttatcattcttgttgccacagctggagctctcaaactaaaagacatttgttattttggaaagaagaaagactctattctcaaagtttcctaatcagaaatttttatcagtttccagtctcaaaaatacaaaataaaaacaaacgtttttaatact

SEQ ID NO: 1020 - DNA, 1622 bp; single-stranded, linear
  immediate source library: GENBANK
  immediate source clone: g179933
atgaggctcatcctgcctgtgggtttgattgctaccactcttgcaattgctcctgtccgctttgacagggagaaggtgttccgcgtgaagccccaggatgaaaaacaagcagacatcataaaggacttggccaaaaccaatgagcttgacttctggtatccaggtgccacccaccacgtagctgctaatatgatggtggatttccgagttagtgagaaggaatcccaagccatccagtctgccttggatcaaaataaaatgcactatgaaatcttgattcatgatctacaagaagagattgagaaacagtttgatgttaaagaagatatcccaggcaggcacagctacgcaaaatacaataattgggaaaagattgtggcttggactgaaaagatgatggataagtatcctgaaatggtctctcgtattaaaattggatctactgttgaagataatccactatatgttctgaagattggggaaaagaatgaaagaagaaaggctatttttatggattgtggcattcacgcacgagaatgggtctccccagcattctgccagtggtttgtctatcaggcaaccaaaacttatgggagaaacaaaattatgaccaaactcttggaccgaatgaatttttacattcttcctgtgttcaatgttgatggatatatttggtcatggacaaagaaccgcatgtggagaaaaaatcgttccaagaaccaaaactccaaatgcatcggcactgacctcaacaggaattttaatgcttcatggaactccattcctaacaccaatgacccatgtgcagataactatcggggctctgcaccagagtccgagaaagagacgaaagctgtcactaatttcattagaagccacctgaatgaaatcaaggtttacatcaccttccattcctactcccagatgctattgtttccctatggatatacatcaaaactgccacctaaccatgaggacttggccaaagttgcaaagattggcactgatgttctatcaactcgatatgaaacccgctacatctatggcccaatagaatcaacaatttacccgatatcaggttcttctttagactgggcttatgacctgggcatcaaacacacatttgcctttgagctccgagataaaggcaaatttggttttctccttccagaatcccggataaagccaacgtgcagagagaccatgctagctgtcaaatttattgccaagtatatcctcaagcatacttcctaaagaactgccctctgtttggaataagccaattaatccttttttgtgcctttcatcagaaagtcaatcttcagttatccccaaatgcagcttctatttcacctgaatccttctcttgctcatttaagtcccatgttactgctgtttgcttttacttactttcagtagcaccataacgaagtagctttaagtgaaaccttttaactacctttctttgctccaagtgaagtttggacccagcagaaagcattattttgaaaggtgatatacagtggggcacagaaaacaaatgaaaaccctcagtttctcacagattttcaccatgtggcttcatcaatttatgtgctaatacaataaaataaaatgcactt

SEQ ID NO: 1021 - DNA, 1495 bp; single-stranded, linear
  immediate source library: GENBANK
  immediate source clone: g179984
atggaaactccaaacaccacagaggactatgacacgaccacagagtttgactatggggatgcaactccgtgccagaaggtgaacgagagggcctttggggcccaactgctgccccctctgtactccttggtatttgtcattggcctggttggaaacatcctggtggtcctggtccttgtgcaatacaagaggctaaaaaacatgaccagcatctacctcctgaacctggccatttctgacctgctcttcctgttcacgcttcccttctggatcgactacaagttgaaggatgactgggtttttggtgatgccatgtgtaagatcctctctgggttttattacacaggcttgtacagcgagatctttttcatcatcctgctgacgattgacaggtacctggccatcgtccacgccgtgtttgccttgcgggcacggaccgtcacttttggtgtcatcaccagcatcatcatttgggccctggccatcttggcttccatgccaggcttatacttttccaagacccaatgggaattcactcaccacacctgcagccttcactttcctcacgaaagcctacgagagtggaagctgtttcaggctctgaaactgaacctctttgggctggtattgcctttgttggtcatgatcatctgctacacagggattataaagattctgctaagacgaccaaatgagaagaaatccaaagctgtccgtttgatttttgtcatcatgatcatcttttttctcttttggaccccctacaatttgactatacttatttctgttttccaagacttcctgttcacccatgagtgtgagcagagcagacatttggacctggctgtgcaagtgacggaggtgatcgcctacacgcactgctgtgtcaacccagtgatctacgccttcgttggtgagaggttccggaagtacctgcggcagttgttccacaggcgtgtggctgtgcacctggttaaatggctccccttcctctccgtggacaggctggagagggtcagctccacatctccctccacaggggagcatgaactctctgctgggttctgactcagaccataggaggccaacccaaaataagcaggcgtgacctgccaggcacactgaccagcagcctggctctcccagccaggttctgactcttggcacagcatggagtccgcctcttggatagagaggaatgtaatggtggcctggggcttctgaggcttctgggcttgagtcttttccatgaacttctcccctggtagaaaagaagatgaatgagcaaaaccaaatattccagagactgggactaagtgtaccagagaagggcttggactcaagcaagatttcagatttgtgaccattagcatttgtcaacaaagtcacccacttcccactattgcttgcacaaaccaattaaacccagtagtggtgactgtgggctccattcaaagtgagctcctaagccatgggagacactgatgtatgagga

SEQ ID NO: 1022 - DNA, 1911 bp; single-stranded, linear
  immediate source library: GENBANK
  immediate source clone: g179999
gaattcccgccgggcttggccatggagctgctgtgccacgaggtggacccggtccgcagggccgtgcgggaccgcaacctgctccgagacgaccgcgtcctgcagaacctgctcaccatcgaggagcgctaccttccgcagtgctcctacttcaagtgcgtgcagaaggacatccaaccctacatgcgcagaatggtggccacctggatgctggaggtctgtgaggaacagaagtgcgaagaagaggtcttccctctggccatgaattacctggaccgtttcttggctggggtcccgactccgaagtcccatctgcaactcctgggtgctgtctgcatgttcctggcctccaaactcaaagagaccagcccgctgaccgcggagaagctgtgcatttacaccgacaactccatcaagcctcaggagctgctggagtgggaactggtggtgctggggaagttgaagtggaacctggcagctgtcactcctcatgacttcattgagcacatcttgcgcaagctgccccagcagcgggagaagctgtctctgatccgcaagcatgctcagaccttcattgctctgtgtgccaccgactttaagtttgccatgtacccaccgtcgatgatcgcaactggaagtgtgggagcagccatctgtgggctccagcaggatgaggaagtgagctcgctcacttgtgatgccctgactgagctgctggctaagatcaccaacacagacgtggattgtctcaaagcttgccaggagcagattgaggcggtgctcctcaatagcctgcagcagtaccgtcaggaccaacgtgacggatccaagtcggaggatgaactggaccaagccagcacccctacagacgtgcgggatatcgacctgtgaggatgccagttgggccgaaagagagagacgcgtccataatctggtctcttcttctttctggttgtttttgttctttgtgttttagggtgaaacttaaaaaaaaaattctgcccccacctagatcatatttaaagatcttttagaagtgagagaaaaaggtcctacgaaaacggaataataaaaagcatttggtgcctatttgaagtacagcataagggaatcccttgtatatgcgaacagttattgtttgattatgtaaaagtaatagtaaaatgcttacagggaaacctgcagagtagttagagaatatgtatgcctgcaatatgggaccaaattagaggagacttttttttttcatgttatgagctagcacatacacccccttgtagtataatttcaaggaactgtgtacgccatttatcgatgattagattgcaaagcaatgaactcaagaaggaattgaaataaggagggacatgatggggaaggagtacaaaacaatctctcaacatgattgaaccatttgggatggagaagcacctttgctctcagccacctgttactaagtcaggagtgtagttggatctctacattaatgtcctcttgctgtctacagtagctgctacctaaaaaaagatgttttattttgccagttggacacaggtgattggctcctgggtttcatgttctgtgacatcctgcttcttcttccaaatgcagttcattgcagacaccaccatattgctatctaatggggaaatgtagctatgggccataaccaaaactcacatgaaacggaggcagatggagaccaagggtgggatccagaatggagtcttttctgttattgtatttaaaagggtaatgtggccttggcatttcttcttagaaaaaaactaatttttggtgctgattggcatgtctggttcacagtttagcattgttataaaccattccattcgaaaagcactttgaaaaattgttcccgagcgatagatgggatggtttatgcaggaattc

SEQ ID NO: 1023 - DNA, 1962 bp; single-stranded, linear
  immediate source library: GENBANK
  immediate source clone: g180002
gaattccgatccccagcccgcccgcccgcgctctccggcccgtcgcctgccttgggactcgcgagcccgcactcccgccctgcctgttcgctgcccgagtatggagctgctgtgttgcgaaggcacccggcacgcgccccgggccgggccggacccgcggctgctgggggaccagcgtgtcctgcagagcctgctccgcctggaggagcgctacgtaccccgcgcctcctacttccagtgcgtgcagcgggagatcaagccgcacatgcggaagatgctggcttactggatgctggaggtatgtgaggagcagcgctgtgaggaggaagtcttccccctggccatgaactacctggatcgctacctgtcttgcgtccccacccgaaaggcgcagttgcagctcctgggtgcggtctgcatgctgctggcctccaagctgcgcgagaccacgcccctgaccatcgaaaaactgtgcatctacaccgaccacgctgtctctccccgccagttgcgggactgggaggtgctggtcctagggaagctcaagtgggacctggctgctgtgattgcacatgatttcctggccttcattctgcaccggctctctctgccccgtgaccgacaggccttggtcaaaaagcatgcccagacctttttggccctctgtgctacagattatacctttgccatgtacccgccatccatgatcgccacgggcagcattggggctgcagtgcaaggcctgggtgcctgctccatgtccggggatgagctcacagagctgctggcagggatcactggcactgaagtggactgcctgcgggcctgtcaggagcagatcgaagctgcactcagggagagcctcagggaagccgctcagaccagctccagcccagcgcccaaagccccccggggctccagcagccaagggcccagccagaccagcactcctacagatgtcacagccatacacctgtagccctggagaggccctctggagtggccactaagcagaggaggggccgctgcacccacctccctgcctccaggaaccacaccacatctaagcctgaaggggcgtctgttcccccttcacaaagcccaagggatctggtcctacccatccccgcagtgtgcactaaggggcccggccagccatgtctgcatttcggtggctagtcaagctcctcctccctgcatctgaccagcagcgcctttcccaactctagctgggggtgggccaggctgatgggacagaattggatacatacaccagcattccttttgaacgcccccccccacccctgggggctctcatgttttcaactgccaaaatgctctagtgccttctaaaggtgttgtcccttctagggttattgcatttggattggggtccctctaaaatttaatgcatgatagacacatatgagggggaatagtctagatggctcctctcagtactttggaggcccctatgtagtccgtgctgacagctgctcctagagggaggggcctaggctcagccagagaagctataaattcctctttgctttgctttctgctcagcttctcctgtgtgattgacagctttgctgctgaaggctcattttaatttattaattgctttgagcacaactttaagaggacgtaatggggtcctggccatcccacaagtggtggtaaccctggtggttgctgttttcctcccttctgctactggcaaaaggatctttgtggccaaggagctgctatagcctggggtggggtcatgccctcctctcccattgtccctctgccccatcctccagcagggaaaatgcagcagggatgccctggaggtgctgagcccctgtctagagagggaggcaagcctgttgacacaggtctttcctaaggctgcaaggtttaggctggtggcccaggaccatcatcctactgtaataaagatgattgtgggaattc

SEQ ID NO: 1024 - DNA, 1327 bp; single-stranded, linear
  immediate source library: GENBANK
  immediate source clone: g180020
gccgctgtgtaggaaagaagctaaagcacttccagagcctgtccggagctcagaggttcggaagacttatcgaccatggagcgcgcgtcctgcttgttgctgctgctgctgccgctggtgcacgtctctgcgaccacgccagaaccttgtgagctggacgatgaagatttccgctgcgtctgcaacttctccgaacctcagcccgactggtccgaagccttccagtgtgtgtctgcagtagaggtggagatccatgccggcggtctcaacctagagccgtttctaaagcgcgtcgatgcggacgccgacccgcggcagtatgctgacacggtcaaggctctccgcgtgcggcggctcacagtgggagccgcacaggttcctgctcagctactggtaggcgccctgcgtgtgctagcgtactcccgcctcaaggaactgacgctcgaggacctaaagataaccggcaccatgcctccgctgcctctggaagccacaggacttgcactttccagcttgcgcctacgcaacgtgtcgtgggcgacagggcgttcttggctcgccgagctgcagcagtggctcaagccaggcctcaaggtactgagcattgcccaagcacactcgcctgccttttcctgcgaacaggttcgcgccttcccggcccttaccagcctagacctgtctgacaatcctggactgggcgaacgcggactgatggcggctctctgtccccacaagttcccggccatccagaatctagcgctgcgcaacacaggaatggagacgcccacaggcgtgtgcgccgcactggcggcggcaggtgtgcagccccacagcctagacctcagccacaactcgctgcgcgccaccgtaaaccctagcgctccgagatgcatgtggtccagcgccctgaactccctcaatctgtcgttcgctgggctggaacaggtgcctaaaggactgccagccaagctcagagtgctcgatctcagctgcaacagactgaacagggcgccgcagcctgacgagctgcccgaggtggataacctgacactggacgggaatcccttcctggtccctggaactgccctcccccacgagggctcaatgaactccggcgtggtcccagcctgtgcacgttcgaccctgtcggtgggggtgtcgggaaccctggtgctgctccaaggggcccggggctttgcctaagatccaagacagaataatgaatggactcaaactgccttggcttcaggggagtcccgtcaggacgttgaggacttttcgaccaattcaaccctttgccccacctttattaaaatcttaaacaacg

SEQ ID NO: 1025 - DNA, 2072 bp; single-stranded, linear
  immediate source library: GENBANK
  immediate source clone: g180035
gggcagtcgtaggagactctgaaaaagcaaataaatcaatgttaaatcagaaatgtgaatgtagtaaggggctgaagagacaggggaagagaatacatgggaaaatattgaaaaggacagagtgatcaaaaaaagcagggacatgggagcattgggcagcacactgggagccatttactttatgctcttattgtatgattgagaaaaaaaatgtccttagtggttaagtggcttttcaatgccacatcagacttgttccatagcagttgaattaggggaaggtgaataagttggaggttggtgacaaggagagaagctggaacagagaggagagtcagaaccagagggaaatgagagactgagtaggcatctcagggtttttgaaggagtggattttctttgttgcagtcaggggaggtttgtctgttggctgcagaaagaagtcagaatagagatatcgtggggtaggtttgtttggaacagaaatcaaagaccaatttttctgagagaaggaaataacatctgcaaatgatatgctgtttttgctacttccattgttagctgttctcccaggtgatggcaatgcagacgggctcaaggagcctctctccttccatgtcatctggatcgcatccttttacaaccattcctggaaacaaaatctggtctcaggttggctgagtgatttgcagactcatacctgggacagcaattccagcaccatcgttttcctgtggccctggtccaggggaaacttcagcaatgaggagtggaaggaactggaaacattattccgtatacgcaccattcggtcatttgagggaattcgtagatacgcccatgaattgcagtttgaatatccttttgagatacaggtgacaggaggctgtgagctgcactctggaaaggtctcaggaagcttcttgcagttagcttatcaaggatcagactttgtgagcttccagaacaattcatggttgccatatccagtggctgggaatatggccaagcatttctgcaaagtgctcaatcagaatcagcatgaaaatgacataacacacaatcttctcagtgacacctgcccacgtttcatcttgggtcttcttgatgcaggaaaggcacatctccagcggcaagtgaagcccgaggcctggctgtcccatggccccagtcctggccctggccatctgcagcttgtgtgccatgtctcaggattctacccaaagcccgtgtgggtgatgtggatgcggggtgagcaggagcagcagggcactcagcgaggggacatcttgcccagtgctgatgggacatggtatctccgcgcaaccctggaggtggccgctggggaggcagctgacctgtcctgtcgggtgaagcacagcagtctagagggccaggacatcgtcctctactgggagcatcacagttccgtgggcttcatcatcttggcggtgatagtgcctttacttcttctgataggtcttgcgctttggttcaggaaacgctgtttctgttaagacacaccatgagcctcctcgtcacccttctccttttggggtgagagaccagcagcccaagggctccagacacacctgaacacatcgtgatgatgacgtcctctcaactctctttgtaaaaattttgttatttttgcttgtttctgattaatgattgtttgtcaatataagctcaatttaattttgcaggatttgttgttctgacctgggttctgggacttttaaattcaaattttatctccagatggaatggggtcctagcaacctccacatgttcacctattaatggatcatcaggcctgttttagatatcccttactccagagggccttccctgacttacaagtgggaagcagtctcttcctggtctgaactcccgccacattttagccgtactttgctaactgtgctcctcacttcctcttcttcattgcagttatttagatcccccctttccttctaatttttcagctccttcaatgcaaagtacatgtatttttaatatatgcatccctggtgaaggatcttgcctgcatgaaacatgttctcaataaa

SEQ ID NO: 1026 - DNA, 2924 bp; single-stranded, linear
  immediate source library: GENBANK
  immediate source clone: g180082
gacgccgacgatgaagacaccgtggaaggttcttctgggactgctgggtgctgctgcgcttgtcaccatcatcaccgtgcccgtggttctgctgaacaaaggcacagatgatgctacagctgacagtcgcaaaacttacactctaactgattacttaaaaaatacttatagactgaagttatactccttaagatggatttcagatcatgaatatctctacaaacaagaaaataatatcttggtattcaatgctgaatatggaaacagctcagttttcttggagaacagtacatttgatgagtttggacattctatcaatgattattcaatatctcctgatgggcagtttattctcttagaatacaactacgtgaagcaatggaggcattcctacacagcttcatatgacatttatgatttaaataaaaggcagctgattacagaagagaggattccaaacaacacacagtgggtcacatggtcaccagtgggtcataaattggcatatgtttggaacaatgacatttatgttaaaattgaaccaaatttaccaagttacagaatcacatggacggggaaagaagatataatatataatggaataactgactgggtttatgaagaggaagtcttcagtgcctactctgctctgtggtggtctccaaacggcacttttttagcatatgcccaatttaacgacacagaagtcccacttattgaatactccttctactctgatgagtcactgcagtacccaaagactgtacgggttccatatccaaaggcaggagctgtgaatccaactgtaaagttctttgttgtaaatacagactctctcagctcagtcaccaatgcaacttccatacaaatcactgctcctgcttctatgttgataggggatcactacttgtgtgatgtgacatgggcaacacaagaaagaatttctttgcagtggctcaggaggattcagaactattcggtcatggatatttgtgactatgatgaatccagtggaagatggaactgcttagtggcacggcaacacattgaaatgagtactactggctgggttggaagatttaggccttcagaacctcattttacccttgatggtaatagcttctacaagatcatcagcaatgaagaaggttacagacacatttgctatttccaaatagataaaaaagactgcacatttattacaaaaggcacctgggaagtcatcgggatagaagctctaaccagtgattatctatactacattagtaatgaatataaaggaatgccaggaggaaggaatctttataaaatccaacttagtgactatacaaaagtgacatgcctcagttgtgagctgaatccggaaaggtgtcagtactattctgtgtcattcagtaaagaggcgaagtattatcagctgagatgttccggtcctggtctgcccctctatactctacacagcagcgtgaatgataaagggctgagagtcctggaagacaattcagctttggataaaatgctgcagaatgtccagatgccctccaaaaaactggacttcattattttgaatgaaacaaaattttggtatcagatgatcttgcctcctcattttgataaatccaagaaatatcctctactattagatgtgtatgcaggcccatgtagtcaaaaagcagacactgtcttcagactgaactgggccacttaccttgcaagcacagaaaacattatagtagctagctttgatggcagaggaagtggttaccaaggagataagatcatgcatgcaatcaacagaagactgggaacatttgaagttgaagatcaaattgaagcagccagacaattttcaaaaatgggatttgtggacaacaaacgaattgcaatttggggctggtcatatggagggtacgtaacctcaatggtcctgggatcaggaagtggcgtgttcaagtgtggaatagccgtggcgcctgtatcccggtgggagtactatgactcagtgtacacagaacgttacatgggtctcccaactccagaagacaaccttgaccattacagaaattcaacagtcatgagcagagctgaaaattttaaacaagttgagtacctccttattcatggaacagcagatgataacgttcactttcagcagtcagctcagatctccaaagccctggtcgatgttggagtggatttccaggcaatgtggtatactgatgaagaccatggaatagctagcagcacagcacaccaacatatatatacccacatgagccacttcataaaacaatgtttctctttaccttagcacctcaaaataccatgccatttaaagcttattaaaactcatttttgttttcattatctcaaaactgcactgtcaagatgatgatgatctttaaaatacacactcaaatcaagaaacttaaggttacctttgttcccaaatttcatacctatcatcttaagtagggacttctgtcttcacaacagattattaccttacagaagtttgaattatccggtcgggttttattgtttaaaatcatttctgcatcagctgctgaaacaacaaataggaattgtttttatggaggctttgcatagattccctgagcaggattttaatctttttctaactggactggttcaaatgttgttctcttctttaaagggatggcaagatgtgggcagtgatgtcactagggcagggacaggataagagggattagggagagaagatagcagggcatggctgggaacccaagtccaagcataccaacacgaccaggctactgtcagctcccctcggagaaaactgtgcagtctgcgtgtgaacagctcttctcctttagagcacaatggatctcgagggatcttccatacctaccagttctgcgcctcgaggccgcgactctaga

SEQ ID NO: 1027 - DNA, 1204 bp; single-stranded, linear
  immediate source library: GENBANK
  immediate source clone: g180084
ggggtgcaaagaagagacagcagcgcccagcttggaggtgctaactccagaggccagcatcagcaactgggcacagaaaggagccgcctgggcagggaccatggcacggccacatccctggtggctgtgcgttctggggaccctggtggggctctcagctactccagcccccaagagctgcccagagaggcactactgggctcagggaaagctgtgctgccagatgtgtgagccaggaacattcctcgtgaaggactgtgaccagcatagaaaggctgctcagtgtgatccttgcataccgggggtctccttctctcctgaccaccacacccggccccactgtgagagctgtcggcactgtaactctggtcttctcgttcgcaactgcaccatcactgccaatgctgagtgtgcctgtcgcaatggctggcagtgcagggacaaggagtgcaccgagtgtgatcctcttccaaacccttcgctgaccgctcggtcgtctcaggccctgagcccacaccctcagcccacccacttaccttatgtcagtgagatgctggaggccaggacagctgggcacatgcagactctggctgacttcaggcagctgcctgcccggactctctctacccactggccaccccaaagatccctgtgcagctccgattttattcgcatccttgtgatcttctctggaatgttccttgttttcaccctggccggggccctgttcctccatcaacgaaggaaatatagatcaaacaaaggagaaagtcctgtggagcctgcagagccttgtcgttacagctgccccagggaggaggagggcagcaccatccccatccaggaggattaccgaaaaccggagcctgcctgctccccctgagccagcacctgcggtagctgcactacagccctggcctccacccccaccccgccgaccatccaagggagagtgagacctggcagccacaactgcagtcccatcctcttgtcagggccctttcctgtgtacacgtgacagagtgccttttcgagactggcagggacgaggacaaatatggatgaggtggagagtgggaagcaggagcccagccagctgcgcctgcgctgcaggagggcgggggctctggttgtaaaacacacttcctgctgcgaaagacccacatgctacaagacgggcaaaataaagtgacagatgaccacc

SEQ ID NO: 1028 - DNA, 3630 bp; single-stranded, linear
  immediate source library: GENBANK
  immediate source clone: g180095
atacgggagaactaaggctgaaacctcggaggaacaaccacttttgaagtgacttcgcggcgtgcgttgggtgcggactaggtggccccggcgggagtgtgctggagcctgaagtccacgcgcgcggctgagaaccgccgggaccgcacgtgggcgccgcgcgcttcccccgcttcccaggtgggcgccggccgccaggccacctcacgtccggccccggggatgcgcgtcctcctcgccgcgctgggactgctgttcctgggggcgctacgagccttcccacaggatcgacccttcgaggacacctgtcatggaaaccccagccactactatgacaaggctgtcaggaggtgctgttaccgctgccccatggggctgttcccgacacagcagtgcccacagaggcctactgactgcaggaagcagtgtgagcctgactactacctggatgaggccgaccgctgtacagcctgcgtgacttgttctcgagatgacctcgtggagaagacgccgtgtgcatggaactcctcccgtgtctgcgaatgtcgacccggcatgttctgttccacgtctgccgtcaactcctgtgcccgctgcttcttccattctgtctgtccggcagggatgattgtcaagttcccaggcacggcgcagaagaacacggtctgtgagccggcttccccaggggtcagccctgcctgtgccagcccagagaactgcaaggaaccctccagtggcaccatcccccaggccaagcccaccccggtgtccccagcaacctccagtgccagcaccatgcctgtaagagggggcacccgcctcgcccaggaagctgcttctaaactgacgagggctcccgactctccctcctctgtgggaaggcctagttcagatccaggtctgtccccaacacagccatgcccagaggggtctggtgattgcagaaagcagtgtgagcccgactactacctggacgaggccggccgctgcacagcctgcgtgagctgttctcgagatgaccttgtggagaagacgccatgtgcatggaactcctcccgcacctgcgaatgtcgacctggcatgatctgtgccacatcagccaccaactcctgtgcccgctgtgtcccctacccaatctgtgcagcagagacggtcaccaagccccaggatatggctgagaaggacaccacctttgaggcgccacccctggggacccagccggactgcaaccccaccccagagaatggcgaggcgcctgccagcaccagccccactcagagcttgctggtggactcccaggccagtaagacgctgcccatcccaaccagcgctcccgtcgctctctcctccacggggaagcccgttctggatgcagggccagtgctcttctgggtgatcctggtgttggttgtggtggtcggctccagcgccttcctcctgtgccaccggagggcctgcaggaagcgaattcggcagaagctccacctgtgctacccggtccagacctcccagcccaagctagagcttgtggattccagacccaggaggagctcaacgcagctgaggagtggtgcgtcggtgacagaacccgtcgcggaagagcgagggttaatgagccagccactgatggagacctgccacagcgtgggggcagcctacctggagagcctgccgctgcaggatgccagcccggccgggggcccctcgtcccccagggaccttcctgagccccgggtgtccacggagcacaccaataacaagattgagaaaatctacatcatgaaggctgacaccgtgatcgtggggaccgtgaaggctgagctgccggagggccggggcctggcggggccagcagagcccgagttggaggaggagctggaggcggaccataccccccactaccccgagcaggagacagaaccgcctctgggcagctgcagcgatgtcatgctctcagtggaagaggaagggaaagaagaccccttgcccacagctgcctctggaaagtgaggcctgggctgggctggggctaggagggcagcagggtggcctctgggaggccaggatggcactgttggcaccgaggttgggggcagaggcccatctggcctgaactgaggctccagcatctagtggtggaccggccggtcactgcaggggtctggtggtctctgcttgcatccccaacttagctgtcccctgacccagagcctaggggatccggggcttgtacagaagagacagtccaaggggactggatcccagcagtgatgttggttgaggcagcaaacagatggcaggatgggcactgccgagaacagcattggtcccagagccctgggcatcagaccttaaccaccaggcccacagcccagcgagggagaggtcgtgaggccagctcccggggcccctgtaaccctactctcctctctccctggacctcagaggtgacacccattgggcccttccggcatgcccccagttactgtaaatgtggcccccagtgggcatggagccagtgcctgtggttgtttctccagagtcaaaagggaagtcgagggatggggcgtcgtcagctggcactgtctctgctgcagcggccacactgtactctgcactggtgtgagggcccctgcctggactgtgggaccctcctggtgctgcccaccttccctgtcctgtagccccctcggtgggcccagggcctaggggcccaggatcaagtcactcatctcagaatgtccccaccaatccccgccacagcaggcgcctcgggtcccagatgtctgcagccctcagcagctgcagaccgcccctcaccaacccagagaacctgctttactttgcccagggacttcctccccatgtgaacatggggaacttcgggccctgcctggagtccttgaccgctctctgtgggccccacccactctgtcctgggaaatgaagaagcatcttccttaggtctgccctgcttgcaaatccactagcaccgaccccaccacctggttccggctctgcacgctttggggtgtggatgtcgagaggcaccacggcctcacccaggcatctgctttactctggaccataggaaacaagaccgtttggaggtttcatcaggattttgggtttttcacatttcacgctaaggagtagtggccctgacttccggtcggctggccagctgactccctagggccttcagacgtgtatgcaaatgagtgatggataaggatgagtcttggagttgcgggcagcctggagactcgtggacttaccgcctggaggcaggcccgggaaggctgctgtttactcatcgggcagccacgtgctctctggaggaagtgatagtttctgaaaccgctcagatgttttggggaaagttggagaagccgtggccttgcgagaggtggttacaccagaacctggacattggccagaagaagcttaagtgggcagacactgtttgcccagtgtttgtgcaaggatggagtgggtgtctctgcatcacccacagccgcagctgtaaggcacgctggaaggcacacgcctgccaggcagggcagtctggcgcccatgatgggagggattgacatgtttcaacaaaataatgcacttccttaaaaaaaa

SEQ ID NO: 1029 - DNA, 1437 bp; single-stranded, linear
  immediate source library: GENBANK
  immediate source clone: g180097
gcttcctcagacatgccgctgctgctactgctgcccctgctgtgggcaggggccctggctatggatccaaatttctggctgcaagtgcaggagtcagtgacggtacaggagggtttgtgcgtcctcgtgccctgcactttcttccatcccataccctactacgacaagaactccccagttcatggttactggttccgggaaggagccattatatccggggactctccagtggccacaaacaagctagatcaagaagtacaggaggagactcagggcagattccgcctccttggggatcccagtaggaacaactgctccctgagcatcgtagacgccaggaggagggataatggttcatacttctttcggatggagagaggaagtaccaaatacagttacaaatctccccagctctctgtgcatgtgacagacttgacccacaggcccaaaatcctcatccctggcactctagaacccggccactccaaaaaccttacctgctctgtgtcctgggcctgtgagcagggaacacccccgatcttctcctggttgtcagctgcccccacctccctgggccccaggactactcactcctcggtgctcataatcaccccacggccccaggaccacggcaccaacctgacctgtcaggtgaagttcgctggagctggtgtgactacggagagaaccatccagctcaacgtcacctatgttccacagaacccaacaactggtatctttccaggagatggctcagggaaacaagagaccagagcaggactggttcatggggccattggaggagctggtgttacagccctgctcgctctttgtctctgcctcatcttcttcatagtgaagacccacaggaggaaagcagccaggacagcagtgggcagcaatgacacccaccctaccacagggtcagcctccccgaaacaccagaagaactccaagttacatggccccactgaaacctcaagctgttcaggtgccgcccctactgtggagatggatgaggagctgcattatgcttccctcaactttcatgggatgaatccttccaaggacacctccaccgaatactcagaggtcaggacccagtgaggaaccctcaagagcatcaggctcagctagaagatccacatcctctacaggtcggggaccaaaggctgattcttggagatttaactccccacaggcaatgggtttatagacattatgtgagtttcctgctatattaacatcatcttgagactttgcaagcagagagtcgtggaatcaaatctgtgctctttcatttgctaagtgtatgatgtcacacaagctccttaaccttccatgtctccattttcttctctgtgaagtaggtataagaagtcctatctcatagggatgctgtgagcattaaataaaggtacacatggaaaacaccag

SEQ ID NO: 1030 - DNA, 2615 bp; single-stranded, linear
  immediate source library: GENBANK
  immediate source clone: g180108
ccttttttggcctcgacggcggcaacccagcctccctcctaacgccctccgcctttgggaccaaccaggggagctcaagttagtagcagccaaggagaggcgctgccttgccaagactaaaaagggaggggagaagagaggaaaaaagcaagaatcccccacccctctcccgggcggagggggcgggaagagcgcgtcctggccaagccgagtagtgtcttccactcggtgcgtctctctaggagccgcgcgggaaggatgctggtccgcaggggcgcgcgcgagggcccaggatgccgcggggctggaccgcgctttgcttgctgagtttgctgccttctgggttcatgagtcttgacaacaacggtactgctaccccagagttacctacccagggaacattttcaaatgtttctacaaatgtatcctaccaagaaactacaacacctagtacccttggaagtaccagcctgcaccctgtgtctcaacatggcaatgaggccacaacaaacatcacagaaacgacagtcaaattcacatctacctctgtgataacctcagtttatggaaacacaaactcttctgtccagtcacagacctctgtaatcagcacagtgttcaccaccccagccaacgtttcaactccagagacaaccttgaagcctagcctgtcacctggaaatgtttcagacctttcaaccactagcactagccttgcaacatctcccactaaaccctatacatcatcttctcctatcctaagtgacatcaaggcagaaatcaaatgttcaggcatcagagaagtgaaattgactcagggcatctgcctggagcaaaataagacctccagctgtgcggagtttaagaaggacaggggagagggcctggcccgagtgctgtgtggggaggagcaggctgatgctgatgctggggcccaggtatgctccctgctccttgcccagtctgaggtgaggcctcagtgtctactgctggtcttggccaacagaacagaaatttccagcaaactccaacttatgaaaaagcaccaatctgacctgaaaaagctggggatcctagatttcactgagcaagatgttgcaagccaccagagctattcccaaaagaccctgattgcactggtcacctcgggagccctgctggctgtcttgggcatcactggctatttcctgatgaatcgccgcagctggagccccacaggagaaaggctgggcgaagacccttattacacggaaaacggtggaggccagggctatagctcaggacctgggacctcccctgaggctcagggaaaggccagtgtgaaccgaggggctcagaaaaacgggaccggccaggccacctccagaaacggccattcagcaagacaacacgtggtggctgataccgaattgtgactcggctaggtggggcaaggctgggcagtgtccgagagagcacccctctctgcatctgaccacgtgctacccccatgctggaggtgacatctcttacgcccaacccttccccactgcacacacctcagaggctgttcttggggccctacaccttgaggagggggcaggtaaactcctgtcctttacacattcggctccctggagccagactctggtcttctttgggtaaacgtgtgacgggggaaagccaaggtctggagaagctcccaggaacaatcgatggccttgcagcactcacacaggacccccttcccctaccccctcctctctgccgcaatacaggaacccccaggggaaagatgagcttttctaggctacaattttctcccaggaagctttgatttttaccgtttcttccctgtattttctttctctactttgaggaaaccaaagtaaccttttgcacctgctctcttgtaatgatatagccagaaaaacgtgttgccttgaaccacttccctcatctctcctccaagacactgtggacttggtcaccagctcctcccttgttctctaagttccactgagctccatgtgccccctctaccatttgcagagtcctgcacagttttctggctggagcctagaacaggcctcccaagttttaggacaaacagctcagttctagtctctctggggccacacagaaactctttttgggctcctttttctccctctggatcaaagtaggcaggaccatgggaccaggtcttggagctgagcctctcacctgtactcttccgaaaaatcctcttcctctgaggctggatcctagccttatcctctgatctccatggcttcctcctccctcctgccgactcctgggttgagctgttgcctcagtcccccaacagatgcttttctgtctctgcctccctcaccctgagccccttccttgctctgcacccccatatggtcatagcccagatcagctcctaacccttatcaccagctgcctcttctgtgggtgacccaggtccttgtttgctgttgatttctttccagaggggttgagcagggatcctggtttcaatgacggttggaaatagaaatttccagagaagagagtattgggtagatattttttctgaatacaaagtgatgtgtttaaatactgcaattaaagtgatactgaaacac

SEQ ID NO: 1031 - DNA, 1820 bp; single-stranded, linear
  immediate source library: GENBANK
  immediate source clone: g180116
ggggatgcaactaagttgctgagacaagggaagagagatgaggaaccagagcttgtagaaaccactttaatcatatccaggagtttgcaagaaacaggtgcttaacactaattcacctcctgaacaagaaaaatgggctgtgaccggaactgtgggctcatcgctggggctgtcattggtgctgtcctggctgtgtttggaggtattctaatgccagttggagacctgcttatccagaagacaattaaaaagcaagttgtcctcgaagaaggtacaattgcttttaaaaattgggttaaaacaggcacagaagtttacagacagttttggatctttgatgtgcaaaatccacaggaagtgatgatgaacagcagcaacattcaagttaagcaaagaggtccttatacgtacagagttcgttttctagccaaggaaaatgtaacccaggacgctgaggacaacacagtctctttcctgcagcccaatggtgccatcttcgaaccttcactatcagttggaacagaggctgacaacttcacagttctcaatctggctgtggcagctgcatcccatatctatcaaaatcaatttgttcaaatgatcctcaattcacttattaacaagtcaaaatcttctatgttccaagtcagaactttgagagaactgttatggggctatagggatccatttttgagtttggttccgtaccctgttactactacagttggtctgttttatccttacaacaatactgcagatggagtttataaagttttcaatggaaaagataacataagtaaagttgccataatcgacacatataaaggtaaaaggaatctgtcctattgggaaagtcactgcgacatgattaatggtacagatgcagcctcatttccaccttttgttgagaaaagccaggtattgcagttcttttcttctgatatttgcaggtcaatctatgctgtatttgaatccgacgttaatctgaaaggaatccctgtgtatagattcgttcttccatccaaggcctttgcctctccagttgaaaacccagacaactattgtttctgcacagaaaaaattatctcaaaaaattgtacatcatatggtgtgctagacatcagcaaatgcaaagaagggagacctgtgtacatttcacttcctcattttctgtatgcaagtcctgatgtttcagaacctattgatggattaaacccaaatgaagaagaacataggacatacttggatattcaacctataactggattcactttacaatttgcaaaacggctgcaggtcaacctattggtcaagccatcagaaaaaattcaagtattaaagaatctgaagaggaactatattgtgcctattctttggcttaatgagactgggaccattggtgatgagaaggcaaacatgttcagaagtcaagtaactggaaaaataaacctccttggcctgatagaaatgatcttactcagtgttggtgtggtgatgtttgttgcttttatgatttcatattgtgcatgcagatcgaaaacaataaaataagtatgtaccaaaaaatattgcttcaataatattagcttatatattacttgttttcactttatcaaagagaagttacatattaggccatatatatttctagacatgtctagccactgatcatttttaaatataggtaaataaacctataaatattatcacgcagatcactaaagtatatctttaattctgggagaaatgagataaaagatgtacttgtgaccattgtaacaatagcacaataaagcactgtgccaaagttgtccaaaaaa

SEQ ID NO: 1032 - DNA, 1048 bp; single-stranded, linear
  immediate source library: GENBANK
  immediate source clone: g180138
ctgtgaaagaaggaagcatgtggtccagaggttgggattcgtgtctggctctggaattgctactgctgcctctgtcactcctggtgaccagcattcaaggtcacttggtacatatgaccgtggtctccggcagcaacgtgactctgaacatctctgagagcctgcctgagaactacaaacaactaacctggttttatactttcgaccagaagattgtagaatgggattccagaaaatctaagtactttgaatccaaatttaaaggcagggtcagacttgatcctcagagtggcgcactgtacatctctaaggtccagaaagaggacaacagcacctacatcatgagggtgttgaaaaagactgggaatgagcaagaatggaagatcaagctgcaagtgcttgaccctgtacccaagcctgtcatcaaaattgagaagatagaagacatggatgacaactgttatctgaaactgtcatgtgtgatacctggcgagtctgtaaactacacctggtatggggacaaaaggcccttcccaaaggagctccagaacagtgtgcttgaaaccacccttatgccacataattactccaggtgttatacttgccaagtcagcaattctgtgagcagcaagaatggcaccgtctgcctcagtccaccctgtaccctggcccggtcctttggagtagaatggattgcaagttggctagtggtcacggtgcccaccattcttggcctgttacttacctgagatgagctcttttaactcaagcgaaacttcaaggccagaagatcttgcctgttggtgatcatgctcctcagcaggacagagactgtataggctgaccagaagcatgctgctgaattatcaacgaggattttcaagttaacttttaaatactggttattatttaattttatatccctttgttgttttgtagtacacagagattatagagatacacatgcttttttcccaaaattgtgacaacattatgtggaatcttttattatttttaaaataaaaagatataattataaaaaaaaaaa

SEQ ID NO: 1033 - DNA, 1452 bp; single-stranded, linear
  immediate source library: GENBANK
  immediate source clone: g180140
ctcaaggataatcactaaattctgccgaaaggactgaggaacggtgcctggaaaagggcaagaatatcacggcatgggcatgagtagcttgaaactgctgaagtatgtcctgtttttcttcaacttgctcttttggatctgtggctgctgcattttgggctttgggatctacctgctgatccacaacaacttcggagtgctcttccataacctcccctccctcacgctgggcaatgtgtttgtcatcgtgggctctattatcatggtagttgccttcctgggctgcatgggctctatcaaggaaaacaagtgtctgcttatgtcgttcttcatcctgctgctgattatcctccttgctgaggtgaccttggccatcctgctctttgtatatgaacagaagctgaatgagtatgtggctaagggtctgaccgacagcatccaccgttaccactcagacaatagcaccaaggcagcgtgggactccatccagtcatttctgcagtgttgtggtataaatggcacgagtgattggaccagtggcccaccagcatcttgcccctcagatcgaaaagtggagggttgctatgcgaaagcaagactgtggtttcattccaatttcctgtatatcggaatcatcaccatctgtgtatgtgtgattgaggtgttggggatgtcctttgcactgaccctgaactgccagattgacaaaaccagccagaccatagggctatgatctgcagtagttctgtggtgaagagacttgtttcatctccggaaatgcaaaaccatttatagcatgaagccctacatgatcactgcaggatgatcctcctcccatcctttccctttttaggtccctgtcttatacaaccagagaagtgggtgttggccaggcacatcccatctcaggcagcaagacaatctttcactcactgacggcagcagccatgtctctcaaagtggtgaaactaatatctgagcatcttttagacaagagaggcaaagacaaactggatttaatggcccaacatcaaagggtgaacccaggatatgaatttttgcatcttcccattgtcgaattagtctccagcctctaaataatgcccagtcttctccccaaagtcaagcaagagactagttgaagggagttctggggccaggctcactggaccattgtcacaaccctctgtttctctttgactaagtgccctggctacaggaattacacagttctctttctccaaagggcaagatctcatttcaatttctttattagagggccttattgatgtgttctaagtctttccagaaaaaaactatccagtgatttatatcctgatttcaaccagtcacttagctgataatcacagtaagaagacttctggtattatctctctatcagataagattttgttaatgtactattttactcttcaataaataaaacagttt

SEQ ID NO: 1034 - DNA, 1671 bp; single-stranded, linear
  immediate source library: GENBANK
  immediate source clone: g180152
ggcgccgccaggttctgtggacaatcacaatgggaatccaaggagggtctgtcctgttcgggctgctgctcgtcctggctgtcttctgccattcaggtcatagcctgcagtgctacaactgtcctaacccaactgctgactgcaaaacagccgtcaattgttcatctgattttgatgcgtgtctcattaccaaagctgggttacaagtgtataacaagtgttggaagtttgagcattgcaatttcaacgacgtcacaacccgcttgagggaaaatgagctaacgtactactgctgcaagaaggacctgtgtaactttaacgaacagcttgaaaatggtgggacatccttatcagagaaaacagttcttctgctggtgactccatttctggcagcagcctggagccttcatccctaagtcaacaccaggagagcttctcccaaactccccgttcctgcgtagtccgctttctcttgctgccacattctaaaggcttgatattttccaaatggatcctgttgggaaagaataaaattagcttgagcaacctggctaagatagaggggctctgggagactttgaagaccagtcctgtttgcagggaagccccacttgaaggaagaagtctaagagtgaagtaggtgtgacttgaactagattgcatgcttcctcctttgctcttgggaagaccagctttgcagtgacagcttgagtgggttctctgcagccctcagattatttttcctctggctccttggatgtagtcagttagcatcattagtacatctttggagggtggggcaggagtatatgagcatcctctctcacatggaacgctttcataaacttcagggatcccgtgttgccatggaggcatgccaaatgttccatatgtgggtgtcagtcagggacaacaagatccttaatgcagagctagaggacttctggcagggaagtggggaagtgttccagatagcagggcatgaaaacttagagaggtacaagtggctgaaaatcgagtttttcctctgtctttaaattttatatgggctttgttatcttccactggaaaagtgtaatagcatacatcaatggtgtgttaaagctatttccttgcctttttttattggaatggtaggatatcttggctttgccacacacagttacagagtgaacactctactacatgtgactggcagtattaagtgtgcttattttaaatgttactggtagaaaggcagttcaggtatgtgtgtatatagtatgaatgcagtggggacaccctttgtggttacagtttgagacttccaaaggtcatccttaataacaacagatctgcaggggtatgttttaccatctgcatccagcctcctgctaactcctagctgactcagcatagattgtataaaatacctttgtaacggctcttagcacactcacagatgtttgaggctttcagaagctcttctaaaaaatgatacacacctttcacaagggcaaactttttccttttccctgtgtattctagtgaatgaatctcaagattcagtagacctaatgacatttgtattttatgatcttggctgtatttaatggcataggctgacttttgcagatggaggaatttcttgattaatgttgaaaaaaaacccttgattatactctgttggac

SEQ ID NO: 1035 - DNA, 875 bp; single-stranded, linear
  immediate source library: GENBANK
  immediate source clone: g180154
gccgcggcgggagaggaacgcgcagccagccttgggaagcccaggcccggcagccatggcggtggaaggaggaatgaaatgtgtgaagttcttgctctacgtcctcctgctggccttttgcgcctgtgcagtgggactgattgccgtgggtgtcggggcacagcttgtcctgagtcagaccataatccagggggctacccctggctctctgttgccagtggtcatcatcgcagtgggtgtcttcctcttcctggtggcttttgtgggctgctgcggggcctgcaaggagaactattgtcttatgatcacgtttgccatctttctgtctcttatcatgttggtggaggtggccgcagccattgctggctatgtgtttagagataaggtgatgtcagagtttaataacaacttccggcagcagatggagaattacccgaaaaacaaccacactgcttcgatcctggacaggatgcaggcagattttaagtgctgtggggctgctaactacacagattgggagaaaatcccttccatgtcgaagaaccgagtccccgactcctgctgcattaatgttactgtgggctgtgggattaatttcaacgagaaggcgatccataaggagggctgtgtggagaagattgggggctggctgaggaaaaatgtgctggtggtagctgcagcagcccttggaattgcttttgtcgaggttttgggaattgtctttgcctgctgcctcgtgaagagtatcagaagtggctacgaggtgatgtaggggtctggtctcctcagcctcctcatctgggggagtggaatagtatcctccaggtttttcaattaaacggattattttttcagaccgaaaaaaaaaaaaaaaa

SEQ ID NO: 1036 - DNA, 2055 bp; single-stranded, linear
  immediate source library: GENBANK
  immediate source clone: g180175
caggaagactctgagtccgacgttggcctacccagtcggaaggcagagctgcaatctagttaactacctcctttcccctagatttcctttcattctgctcaagtcttcgcctgtgtccgatccctatctactttctctcctcttgtagcaagcctcagactccaggcttgagctaggttttgtttttctcctggtgagaattcgaagaccatgtctacggaactcttctcatccacaagagaggaaggaagctctggctcaggacccagttttaggtctaatcaaaggaaaatgttaaacctgctcctggagagagacacttcctttaccgtctgtccagatgtccctagaactccagtgggcaaatttcttggtgattctgcaaacctaagcattttgtctggaggaaccccaaaatgttgcctcgatctttcgaatcttagcagtggggagataactgccactcagcttaccacttctgcagaccttgatgaaactggtcacctggattcttcaggacttcaggaagtgcatttagctgggatgaatcatgaccagcacctaatgaaatgtagcccagcacagcttctttgtagcactccgaatggtttggaccgtggccatagaaagagagatgcaatgtgtagttcatctgcaaataaagaaaatgacaatggaaacttggtggacagtgaaatgaaatatttgggcagtcccattactactgttccaaaattggataaaaatccaaacctaggagaagaccaggcagaagagatttcagatgaattaatggagttttccctgaaagatcaagaagcaaaggtgagcagaagtggcctatatcgctccccgtcgatgccagagaacttgaacaggccaagactgaagcaggtggaaaaattcaaggacaacacaataccagataaagttaaaaaaaagtatttttctggccaaggaaagctcaggaagggcttatgtttaaagaagacagtctctctgtgtgacattactatcactcagatgctggaggaagattctaaccaggggcacctgattggtgatttttccaaggtatgtgcgctgccaaccgtgtcagggaaacaccaagatctgaagtatgtcaacccagaaacagtggctgccttactgtcggggaagttccagggtctgattgagaagttttatgtcattgattgtcgctatccatatgagtatctgggaggacacatccagggagccttaaacttatatagtcaggaagaactgtttaacttctttctgaagaagcccatcgtccctttggacacccagaagagaataatcatcgtgttccactgtgaattctcctcagagaggggcccccgaatgtgccgctgtctgcgtgaagaggacaggtctctgaaccagtatcctgcattgtactacccagagctatatatccttaaaggcggctacagagacttctttccagaatatatggaactgtgtgaaccacagagctactgccctatgcatcatcaggaccacaagactgagttgctgaggtgtcgaagccagagcaaagtgcaggaaggggagcggcagctgcgggagcagattgcccttctggtgaaggacatgagcccatgataacattccagccactggctgctaacaagtcaccaaaaagacactgcagaaaccctgagcagaaagaggccttctggatggccaaacccaagattattaaaagatgtctctgcaaaccaacaggctaccaacttgtatccaggcctgggaatggattaggtttcagcagagctgaaagctggtggcagagtcctggagctggctctataaggcagccttgagttgcatagagatttgtattggttcagggaactctggcattccttttcccaactcctcatgtcttctcacaagccagccaactctttctctctgggcttcgggctatgcaagagcgttgtctaccttctttctttgtattttccttctttgtttccccctctttcttttttaaaaatggaaaaataaacactacagaatgag

SEQ ID NO: 1037 - DNA, 2213 bp; single-stranded, linear
  immediate source library: GENBANK
  immediate source clone: g180177
ggaggcggcaacattgtttcaagttggccaaattgacaagagcgagaggtatactgcgttccatcccgacccgggccacggtactgggccctgtttccccctcctcggcccccgagagccagggtccgccttctgcagggttcccaggcccccgctccagggccgggctgacccgactcgctggcgcttcatggagaacttccaaaaggtggaaaagatcggagagggcacgtacggagttgtgtacaaagccagaaacaagttgacgggagaggtggtggcgcttaagaaaatccgcctggacactgagactgagggtgtgcccagtactgccatccgagagatctctctgcttaaggagcttaaccatcctaatattgtcaagctgctggatgtcattcacacagaaaataaactctacctggtttttgaatttctgcaccaagatctcaagaaattcatggatgcctctgctctcactggcattcctcttcccctcatcaagagctatctgttccagctgctccagggcctagctttctgccattctcatcgggtcctccaccgagaccttaaacctcagaatctgcttattaacacagagggggccatcaagctagcagactttggactagccagagcttttggagtccctgttcgtacttacacccatgaggtggtgaccctgtggtaccgagctcctgaaatcctcctgggctgcaaatattattccacagctgtggacatctggagcctgggctgcatctttgctgagatggtgactcgccgggccctattccctggagattctgagattgaccagctcttccggatctttcggactctggggaccccagatgaggtggtgtggccaggagttacttctatgcctgattacaagccaagtttccccaagtgggcccggcaagattttagtaaagttgtacctcccctggatgaagatggacggagcttgttatcgcaaatgctgcactacgaccctaacaagcggatttcggccaaggcagccctggctcaccctttcttccaggatgtgaccaagccagtaccccatcttcgactctgatagccttcttgaagcccccagccctaatctcaccctctcctccagtgtgggcttgaccaggcttgcgcttgggctatttggactcaggtgggccctctgaacttgccttaaacactcaccttctagtcttggccagccaactctgggaatacaggggtgaaaggggggaaccagtgaaaatgaaaggaagtttcagtattagatgcacttaagttagcctccaccaccctttcccccttctcttagttattgctgaagagggttggtataaaaataattttaaaaaagccttcctacacgttagatttgccgtaccaatctctgaatgccccataattattatttccagtgtttgggatgaccaggatcccaagcctcctgctgccacaatgtttataaaggccaaatgatagcgggggctaagttggtgcttttgagaaccaagtaaaacaaaaccactgggaggagtctattttaaagaattcggttgaaaaaaatagatccaatcagtttataccctagttagtgttttgcctcacctaataggctgggagactgaagactcagcccgggtggctgcagaaaaatgattggccccagtccccttgtttgtcccttctacaggcatgaggaatctgggaggccctgagacagggattgtgcttcattccaatctattgcttcaccatggccttatgaggcaggtgagagatgtttgaatttttctcttccttttagtattcttagttgttcagttgccaaggatccctgatcccattttcctctgacgtccacctcctaccccataggagttagaagttagggtttaggcatcattttgagaatgctgacactttttcagggctgtgattgagtgagggcatgggtaaaaatatttctttaaaagaaggatgaacaattatatttatatttcaggttatatccaatagtagagttggctttttttttttttttttggtcatagtgggtggatttgttgccatgtgcaccttggggttttgtaatgacagtgctaaaaaaaaagcattttttttttatgatttgtctctgtcacccttgtccttgagtgctcttgctattaacgttatttgtaatttagtttgta

SEQ ID NO: 1038 - DNA, 2151 bp; single-stranded, linear
  immediate source library: GENBANK
  immediate source clone: g180495
ttcctcgagagctgtcaacacaggctgaggaatctcaaggcccagtgctcaagatgcctagccagcgagcacggagcttccccctgaccaggtcccagtcctgtgagacgaagctacttgacgaaaagaccagcaaactctattctatcaccagccagtgtcatcggctgtcatgaaatccttgctgtgccttccatcttctatctcctgtgcccagactccctgcatccccaaggaaggggcatctccaacatcatcatccaacgaagactcagctgcaaatggttctgctgaaacatctgccttggacacggggttctcgctcaacctttcagagctgagagaatatacagagggtctcacggaagccaaggaagacgatgatggggaccacagttccttcagtctggtcagtccgttatctccctgctgagctcagaagaattaaaaaaactcatcgaggaggtgaaggttctggatgaagcaacattaaagcaattagacggcatccatgtcaccatcttacacaaggaggaaggtgctggtcttgggttcagcttggcaggaggagcagatctagaaaacaaggtgattacggttcacagagtgtttccaaatgggctggcctcccaggaagggactattcagaagggcaatgaggttctttccatcaacggcaagtctctcaaggggaccacgcaccatgatgccttggccatcctccgccaagctcgagagcccaggcaagctgtgattgtcacaaggaagctgactccagagccatgcccgacctcaactcctccactgactctgcagcctcagcctctgcagccagtgatgtttctgtagaatctacagcagaggccacagtctgcacggtgacactggagaagatgtcggcagggctgggcttcagcctggaaggagggaagggctccctacacggagacaagcctctcaccattaacaggattttcaaaggagcagcctcagaacaaagtgagacagtccagcctggagatgaaatcttgcagctgggtggcactgccatgcagggcctcacacggtttgaagcctggaacatcatcaaggcactgcctgatggacctgtcacgattgtcatcaggagaaaaagcctccagtccaaggaaaccacagctgctggagactcctaggcaggacatgctgaagccaaagccaataacacacagctaacacacagctcccataaccgctgattctcagggtctctgctgccgccccacccagatgggggaaagcacaggtgggcttcccagtggctgctgcccaggcccagaccttctaggacgccacccagcaaaaggttgttcctaaaataagggcagagtcacactggggcagctgatacaaattgcagactgtgtaaaaagagagcttaatgataatattgtggtgccacaaataaaatggatttattagaatttcatatgacattcatgcctggcttcgcaaaatgtttcaagtactgtaactgtgtcatgattcacccccaaacagtgacatttatttttctcatgaatctgcaatgtgggcagagattggaatgggcagctcatctctgtcccacttggcatcagctggcgtcatgcaaagtcatgcaaaggctgggaccacgtgagatcattcactcatacatctggccgttgatgttggctgggaactcacctggggctgctggcctgaatgcttataggtggcctctccttgtggcctgggctcctcacaacatggtgtctggattcccaggatgagcatcccaggatcgcaagagccacgtagaagctgcatcttgtttatacctttgccttggaagttgcatggcatcacctccaccatactccatcagttagagctgacacaaacctgcctgggtttaaggggagaggaaatattgctggggtcatttatgaaaaatacagtttgtcacatgaaacatttgcaaaattgtttttggttggattggagaagtaatcctagggaagggtggtggagccagtaaatagaggagtacaggtgaagcaccaagctcaaagcgtggacaggtgtgccgacagaaggaaccagcgtgtatatgagggtatcaaataaaattgctactacttacctacc

SEQ ID NO: 1039 - DNA, 769 bp; single-stranded, linear
  immediate source library: GENBANK
  immediate source clone: g180539
agcctctctgggaagatgctgcttcttcctctccccctgctgctctttctcttgtgctccagagctgaagctggggagatcatcgggggcacagaatgcaagccacattcccgcccctacatggcctacctggaaattgtaacttccaacggtccctcaaaattttgtggtggtttccttataagacggaactttgtgctgacggctgctcattgtgcaggaaggtctataacagtcacccttggagcccataacataacagaggaagaagacacatggcagaagcttgaggttataaagcaattccgtcatccaaaatataacacttctactcttcaccacgatatcatgttactaaagttgaaggagaaagccagcctgaccctggctgtggggacactccccttcccatcacaattcaactttgtcccacctgggagaatgtgccgggtggctggctggggaagaacaggtgtgttgaagccgggctcagacactctgcaagaggtgaagctgagactcatggatccccaggcctgcagccacttcagagactttgaccacaatcttcagctgtgtgtgggcaatcccaggaagacaaaatctgcatttaagggagactctgggggccctcttctgtgtgctggggtggcccagggcatcgtatcctatggacggtcggatgcaaagccccctgctgtcttcacccgaatctcccattaccggccctggatcaaccagatcctgcaggcaaattaatcctggatcc

SEQ ID NO: 1040 - DNA, 2223 bp; single-stranded, linear
  immediate source library: GENBANK
  immediate source clone: g180617
gctcgccagggaagggccctacccagaggacagaaagaaagccaggaggggtagagtttgaagagaagatcatgttctccctgaagacgcttccatttctgctcttactccatgtgcagatttccaaggcctttcctgtatcttctaaagagaaaaatacaaaaactgttcaggactacctggaaaagttctaccaattaccaagcaaccagtatcagtctacaaggaagaatggcactaatgtgatcgttgaaaagcttaaagaaatgcagcgattttttgggttgaatgtgacggggaagccaaatgaggaaactctggacatgatgaaaaagcctcgctgtggagtgcctgacagtggtggttttatgttaaccccaggaaaccccaagtgggaacgcactaacttgacctacaggattcgaaactataccccacagctgtcagaggctgaggtagaaagagctatcaaggatgcctttgaactctggagtgttgcatcacctctcatcttcaccaggatctcacagggagaggcagatatcaacattgctttttaccaaagagatcacggtgacaattctccatttgatggacccaatggaatccttgctcatgcctttcagccaggccaaggtattggaggagatgctcattttgatgccgaagaaacatggaccaacacctccgcaaattacaacttgtttcttgttgctgctcatgaatttggccattctttggggctcgctcactcctctgaccctggtgccttgatgtatcccaactatgctttcagggaaaccagcaactactcactccctcaagatgacatcgatggcattcaggccatctatggactttcaagcaaccctatccaacctactggaccaagcacacccaaaccctgtgaccccagtttgacatttgatgctatcaccacactccgtggagaaatacttttctttaaagacaggtacttctggagaaggcatcctcagctacaaagagtcgaaatgaattttatttctctattctggccatcccttccaactggtatacaggctgcttatgaagattttgacagagacctcattttcctatttaaaggcaaccaatactgggctctgagtggctatgatattctgcaaggttatcccaaggatatatcaaactatggcttccccagcagcgtccaagcaattgacgcagctgttttctacagaagtaaaacatacttctttgtaaatgaccaattctggagatatgataaccaaagacaattcatggagccaggttatcccaaaagcatatcaggtgcctttccaggaatagagagtaaagttgatgcagttttccagcaagaacatttcttccatgtcttcagtggaccaagatattacgcatttgatcttattgctcagagagttaccagagttgcaagaggcaataaatggcttaactgtagatatggctgaagcaaaatcaaatgtggctgtatccactttcagaatgttgaagggaagttcagcatgcattttcgttacattgtgtcctgcttatacttttctcaatattaagtcattgtttcccatcactgtatccattctacctgtcctccgtgaaaatatgtttggaatattccactatttgcagaggcttattcagttcttacacattccatcttacattagtgattccatcaaagagaaggaaagtaagcctttttgtcacctcaatatttactatttcaatacttacatatctgacttctaggatttattgttatattacttgcctatctgacttcatacatccctcagtttcttaaaatgtcctatgtatatcttctacatgcaatttagaactagattttggttagaagtaaggattataaacaacctagacagtacccttggcctttacagaaaatatggtgctgttttctacccttggaaagaaatgtagatgatatgtttcgtgggttgaattgtgtcccccataaaagatatgttgaagttctaaccccaggtacccatgaatgtgagcttaccagggtctttgcagatgtaattagttaagttaaggtgagatcacactgaattagggtgggctctaaatccattatgactgttgttcttataagaagaagagagcatagccacctaggggaggaggccgtgtgaagacagaggcagagattggagtgacgcatctccaagccaa

SEQ ID NO: 1041 - DNA, 1026 bp; single-stranded, linear
  immediate source library: GENBANK
  immediate source clone: g180623
gaattcccagaaagcaagagaccagagtcccgggaaagtcctgccgcgcctcgggacaattataaaaatgtggccccctgggtcagcctcccagccaccgccctcacctgccgcggccacaggtctgcatccagcggctcgccctgtgtccctgcagtgccggctcagcatgtgtccagcgcgcagcctcctccttgtggctaccctggtcctcctggaccacctcagtttggccagaaacctccccgtggccactccagacccaggaatgttcccatgccttcaccactcccaaaacctgctgagggccgtcagcaacatgctccagaaggccagacaaactctagaattttacccttgcacttctgaagagattgatcatgaagatatcacaaaagataaaaccagcacagtggaggcctgtttaccattggaattaaccaagaatgagagttgcctaaattccagagagacctctttcataactaatgggagttgcctggcctccagaaagacctcttttatgatggccctgtgccttagtagtatttatgaagacttgaagatgtaccaggtggagttcaagaccatgaatgcaaagcttctgatggatcctaagaggcagatctttctagatcaaaacatgctggcagttattgatgagctgatgcaggccctgaatttcaacagtgagactgtgccacaaaaatcctcccttgaagaaccggatttttataaaactaaaatcaagctctgcatacttcttcatgctttcagaattcgggcagtgactattgacagagtgacgagctatctgaatgcttcctaaaaagcgaggtccctccaaaccgttgtcatttttataaaactttgaaatgaggaaactttgataggatgtggattaagaactagggagggggaaagaaggatgggactattacatccacatgatacctctgatcaagtatttttgacatttactgtggataaattgtttttaagttttcatgaatgaattgctaagaa

SEQ ID NO: 1042 - DNA, 2977 bp; single-stranded, linear
  immediate source library: GENBANK
  immediate source clone: g180655
gaggatgaaaaactgaagaagctggtggaacagaatggaacagatgactggaaagttattgccaattatctcccgaatcgaacagatgtgcagtgccagcaccgatggcagaaagtactaaaccctgagctcatcaagggtccttggaccaaagaagaagatcagagagtgatagagcttgtacagaaatacggtccgaaacgttggtctgttattgccaagcacttaaaggggagaattggaaaacaatgtagggagaggtggcataaccacttgaatccagaagttaagaaaacctcctggacagaagaggaagacagaattatttaccaggcacacaagagactggggaacagatgggcagaaatcgcaaagctactgcctggacgaactgataatgctatcaagaaccactggaattctacaatgcgtcggaaggtcgaacaggaaggttatctgcaggagtcttcaaaagccagccagccagcagtggccacaagcttccagaagaacagtcatttgatgggttttgctcaggctccgcctacagctcaactccctgccactggccagcccactgttaacaacgactattcctattaccacatttctgaagcacaaaatgtctccagtcatgttccataccctgtagcgttacatgtaaatatagtcaatgtccctcagccagctgccgcagccattcagagacactataatgatgaagaccctgagaaggaaaagcgaataaaggaattagaattgctcctaatgtcaaccgagaatgagctaaaaggacagcaggtgctaccaacacagaaccacacatgcagctaccccgggtggcacagcaccaccattgccgaccacaccagacctcatggagacagtgcacctgtttcctgtttgggagaacaccactccactccatctctgccagcggatcctggctccctacctgaagaaagcgcctcgccagcaaggtgcatgatcgtccaccagggcaccattctggataatgttaagaacctcttagaatttgcagaaacactccaatttatagattctttcttaaacacttccagtaaccatgaaaactcagacttggaaatgccttctttaacttccacccccctcattggtcacaaattgactgttacaacaccatttcatagagaccagactgtgaaaactcaaaaggaaaatactgtttttagaaccccagctatcaaaaggtcaatcttagaaagctctccaagaactcctacaccattcaaacatgcacttgcagctcaagaaattaaatacggtcccctgaagatgctacctcagacaccctctcatctagtagaagatctgcaggatgtgatcaaacaggaatctgatgaatctggaattgttgctgagtttcaagaaaatggaccacccttactgaagaaaatcaaacaagaggtggaatctccaactgataaatcaggaaacttcttctgctcacaccactgggaaggggacagtctgaatacccaactgttcacgcagacctcgcctgtggcagatgcaccgaatattcttacaagctccgttttaatggcaccagcatcagaagatgaagacaatgttctcaaagcatttacagtacctaaaaacaggtccctggcgagccccttgcagccttgtagcagtacctgggaacctgcatcctgtggaaagatggaggagcagatgacatcttccagtcaagctcgtaaatacgtgaatgcattctcagcccggacgctggtcatgtgagacatttccagaaaagcattatggttttcagaacacttcaagttgacttgggatatatcattcctcaacatgaaacttttcatgaatgggagaagaacctatttttgttgtggtacaacagttgagagcagcaccaagtgcatttagttgaatgaagtcttcttggatttcacccaactaaaaggatttttaaaaataaataacagtcttacctaaattattaggtaatgaattgtagccagttgttaatatcttaatgcagatttttttaaaaaaaaacataaaatgatttatctgtattttaaaggatccaacagatcagtattttttcctgtgatgggttttttgaaatttgacacattaaaaggtactccagtatttcacttttctcgatcactaaacatatgcatatatttttaaaaatcagtaaaagcattactctaagtgtagacttaataccatgtgacatttaatccagattgtaaatgctcatttatggttaatgacattgaaggtacatttattgtaccaaaccattttatgagttttctgttagcttgctttaaaaattattactgtaagaaatagttttataaaaaattatatttttattcagtaatttaattttgtaaatgccaaatgaaaaacgttttttgctgctatggtcttagcctgtagacatgctgctagtatcagaggggcagtagagcttggacagaaagaaaagaaacttggtgttaggtaattgactatgcactagtatttcagactttttaattttatatatatatacattttttttccttctgcaatacatttgaaaacttgtttgggagactctgcattttttattgtggtttttttgttattgttggtttatacaagcatgcgttgcacttcttttttgggagatgtgtgttgttgatgttctatgttttgttttgagtgtagcctgactgttttataatttgggagttctgcatttgatccgcatcccctgtggtttctaagtgtatggtctcagaactgttgcatggatcctgtgtttgcaactggggagacagaaactgtggttgatagccagtcactgccttaagaacatttgatgcaagatggccagcactgaacttttgagatatgacggtgtacttactgccttgtagcaaaataaagatgtgcccttattttacct

SEQ ID NO: 1043 - DNA, 1566 bp; single-stranded, linear
  immediate source library: GENBANK
  immediate source clone: g180710
gcggcggcagcggaggcggcggctccagccggcgcggcgcgaggctcggcggtgggatccggcgggcggtgctagctccgcgctccctgcctcgctcgctgccgggggcggtcggaaggcgcggcgcgaagcccgggtggcccgagggcgcgactctagccttgtcacctcatcttgcccccttggttttggaagtcctgaagagttggtctggaggaggaggaggacattgatgtgcttggtgtgtggccagtggtgaagagatggctgctcctgtcccgtgggcctgctgtgctgtgcttgccgccgccgccgcagttgtctacgcccagagacacagtccacaggaggcaccccatgtgcagtacgagcgcctgggctctgacgtgacactgccatgtgggacagcaaactgggatgctgcggtgacgtggcgggtaaatgggacagacctggcccctgacctgctcaacggctctcagctggtgctccatggcctggaactgggccacagtggcctctacgcctgcttccaccgtgactcctggcacctgcgccaccaagtcctgctgcatgtgggcttgccgccgcgggagcctgtgctcagctgccgctccaacacttaccccaagggcttctactgcagctggcatctgcccacccccacctacattcccaacaccttcaatgtgactgtgctgcatggctccaaaattatggtctgtgagaaggacccagccctcaagaaccgctgccacattcgctacatgcacctgttctccaccatcaagtacaaggtctccataagtgtcagcaatgccctgggccacaatgccacagctatcacctttgacgagttcaccattgtgaagcctgatcctccagaaaatgtggtagcccggccagtgcccagcaaccctcgccggctggaggtgacgtggcagaccccctcgacctggcctgaccctgagtcttttcctctcaagttctttctgcgctaccgacccctcatcctggaccagtggcagcatgtggagctgtccgacggcacagcacacaccatcacagatgcctacgccgggaaggagtacattatccaggtggcagccaaggacaatgagattgggacatggagtgactggagcgtagccgcccacgctacgccctggactgaggaaccgcgacacctcaccacggaggcccaggctgcggagaccacgaccagcaccaccagctccctggcacccccacctaccacgaagatctgtgaccctggggagctgggcagcggcgggggaccctcggcacccttcttggtcagcgtccccatcactctggccctggctgccgctgccgccactgccagcagtctcttgatctgagcccggcaccccatgaggacatgcagagcacctgcagaggagcaggaggccggagctgagcctgcagaccccggtttctattttgcacacgggcaggaggaccttttgcattctcttcagacacaatttgtggagaccccggcgggcccgggcctgccgccccccagccctgccgcaccaagct

SEQ ID NO: 1044 - DNA, 2075 bp; single-stranded, linear
  immediate source library: GENBANK
  immediate source clone: g180923
cccggccgacagccccgagacgacagcccggcgcgtcccggtccccacctccgaccaccgccagcgctccaggccccgcgctccccgctcgccgccaccgcgccctccgctccgcccgcagtgccaaccatgaccgccgccagtatgggccccgtccgcgtcgccttcgtggtcctcctcgccctctgcagccggccggccgtcggccagaactgcagcgggccgtgccggtgcccggacgagccggcgccgcgctgcccggcgggcgtgagcctcgtgctggacggctgcggctgctgccgcgtctgcgccaagcagctgggcgagctgtgcaccgagcgcgacccctgcgacccgcacaagggcctcttctgtgacttcggctccccggccaaccgcaagatcggcgtgtgcaccgccaaagatggtgctccctgcatcttcggtggtacggtgtaccgcagcggagagtccttccagagcagctgcaagtaccagtgcacgtgcctggacggggcggtgggctgcatgcccctgtgcagcatggacgttcgtctgcccagccctgactgccccttcccgaggagggtcaagctgcccgggaaatgctgcgaggagtgggtgtgtgacgagcccaaggaccaaaccgtggttgggcctgccctcgcggcttaccgactggaagacacgtttggcccagacccaactatgattagagccaactgcctggtccagaccacagagtggagcgcctgttccaagacctgtgggatgggcatctccacccgggttaccaatgacaacgcctcctgcaggctagagaagcagagccgcctgtgcatggtcaggccttgcgaagctgacctggaagagaacattaagaagggcaaaaagtgcatccgtactcccaaaatctccaagcctatcaagtttgagctttctggctgcaccagcatgaagacataccgagctaaattctgtggagtatgtaccgacggccgatgctgcaccccccacagaaccaccaccctgccggtggagttcaagtgccctgacggcgaggtcatgaagaagaacatgatgttcatcaagacctgtgcctgccattacaactgtcccggagacaatgacatctttgaatcgctgtactacaggaagatgtacggagacatggcatgaagccagagagtgagagacattaactcattagactggaacttgaactgattcacatctcatttttccgtaaaaatgatttcagtagcacaagttatttaaatctgtttttctaactgggggaaaagattcccacccaattcaaaacattgtgccatgtcaaacaaatagtctatcttccccagacactggtttgaagaatgttaagacttgacagtggaactacattagtacacagcaccagaatgtatattaaggtgtggctttaggagcagtgggagggtaccggcccggttagtatcatcagatcgactcttatacgagtaatatgcctgctatttgaagtgtaattgagaaggaaaattttagcgtgctcactgacctgcctgtagccccagtgacagctaggatgtgcattctccagccatcaagagactgagtcaagttgttccttaagtcagaacagcagactcagctctgacattctgattcgaatgacactgttcaggaatcggaatcctgtcgattagactggacagcttgtggcaagtgaatttgcctgtaacaagccagattttttaaaatttatattgtaaatattgtgtgtgtgtgtgtgtgtgtatatatatatatatatgtacagttatctaagttaatttaaagttgtttgtgcctttttatttttgtttttaatgctttgatatttcaatgttagcctcaatttctgaacaccataggtagaatgtaaagcttgtctgatcgttcaaagcatgaaatggatacttatatggaaattctgctcagatagaatgacagtccgtcaaaacagattgtttgcaaaggggaggcatcagtgtcttggcaggctgatttctaggtaggaaatgtggtagctcacg

SEQ ID NO: 1045 - DNA, 2084 bp; single-stranded, linear
  immediate source library: GENBANK
  immediate source clone: g180968
ggaactgcaaccatggtgcccagcttcctctccctgagcttctcctccttgggcctgtgggcttctgggctgatcttggtcttaggctttctcaagctcatccacctgctgctgcggaggcgaacgttggctaaggctatggacaaattcccagggcctcccacccactggctttttggacatgccctcgagatccaggagacggggagcctggacaaagtggtgtcctgggcccaccagttcccgtatgcccacccactctggttcggacagttcattggcttcctgaacatctatgagcctgactatgccaaagctgtgtacagccgtggggaccctaaggcccctgatgtgtatgacttcttcctccagtggattgggagaggcctgctggttcttgaggggcccaagtggttgcagcaccgcaagctgctcacacctggctttcattatgatgtgctgaagccctatgtggccgtgttcactgagtctacacgtatcatgctggacaagtgggaagagaaagctcgggagggtaagtcctttgacatcttctgcgatgtgggtcacatggcgctgaacacactcatgaagtgcacctttggaagaggagacaccggcctgggccacagggacagcagctactaccttgcagtcagcgatctcactctgttgatgcagcagcgccttgtgtccttccagtaccataatgacttcatctactggctcaccccacatggccgccgcttcctgcgggcctgccaggtggcccatgaccatacagaccaggtcatcagggagcggaaggcagccctgcaggatgagaaggtgcggaagaagatccagaaccggaggcacctggacttcctggacattctcctgggtgcccgggatgaagatgacatcaaactgtcagatgcagacctccgggctgaagtggacacattcatgtttgaaggccatgacaccaccaccagtggtatctcctggtttctctactgcatggccctgtaccctgagcaccagcatcgttgtagagaggaggtccgcgagatcctaggggaccaggacttcttccagtgggatgatctgggcaaaatgacttatctgaccatgtgcatcaaggagagcttccgcctctacccacctgtgccccaggtgtaccgccagctcagcaagcctgtcacctttgtggatggccggtctctacctgcaggaagcctgatctctatgcatatctatgccctccataggaacagtgctgtatggcccgaccctgaggtctttgactctctgcgcttttccactgagaatgcatccaaacgccatccctttgcctttatgcccttctctgctgggcccaggaactgcattgggcagcagtttgccatgagtgagatgaaggtggtcacagccatgtgcttgctccgctttgagttctctctggacccctcacggctgcccatcaagatgccccagcttgtcctgcgctccaagaatggctttcacctccacctgaagccactgggccctgggtctgggaagtagctctgatgagaatggggtcccagatggctcaggctgtgacctccctgggcaccaccctccccaggctgggtgtggaggagttggggccccctgccttcaggaggcttgtagtttagaagggaagtaggcattaccatagacgactcctagaggacagtgctatgtaaaaatgtgtgtctataaatgtttatcatgcatgtattctagagctcattcatttattcaacaaacatttggtgagcacctatttcggttcgagaaacttcatttatctcctataattggcaaacttaaaaatgcagcagaaacttacattccaaccttagagactcatagtgagcacaaggaaagttttgccctgagattcatggttatggctgggtaccaccaaatagaagaatggcttaggggagtgccccttcactgagatgtgtttctttgttgaactttgtgtgtgtgtgtttagaatataacagacataagaaaaaattacctaaatgaagactgtacaaaataataaataattctgaagcaga

SEQ ID NO: 1046 - DNA, 857 bp; single-stranded, linear
  immediate source library: GENBANK
  immediate source clone: g181181
caggaaagatgcagccactcctgcttctgctggcctttctcctacccactggggctgaggcaggggagatcatcggaggccgggagagcaggccccactcccgcccctacatggcgtatcttcagatccagagtccagcaggtcagagcagatgtggagggttcctggtgcgagaagactttgtgctgacagcagctcattgctggggaagcaatataaatgtcaccctgggcgcccacaatatccagagacgggaaaacacccagcaacacatcactgcgcgcagagccatccgccaccctcaatataatcagcggaccatccagaatgacatcatgttattgcagctgagcagaagagtcagacggaatcgaaacgtgaacccagtggctctgcctagagcccaggagggactgagacccgggacgctgtgcactgtggccggctggggcagggtcagcatgaggaggggaacagatacactccgagaggtgcagctgagagtgcagagggataggcagtgcctccgcatcttcggttcctacgacccccgaaggcagatttgtgtgggggaccggcgggaacggaaggctgccttcaagggggattccggaggccccctgctgtgtaacaatgtggcccacggcatcgtctcctatggaaagtcgtcaggggttcctccagaagtcttcaccagggtctcaagtttcctgccctggataaggacaacaatgagaagcttcaaactgctggatcagatggagacccccctgtgactgactcttcttctcggggacacaggccagctccacagtgttgccagagccttaataaacgtccacagagtataaataacc

SEQ ID NO: 1047 - DNA, 2736 bp; single-stranded, linear
  immediate source library: GENBANK
  immediate source clone: g181212
gccccctctgaggtcaaggaacacaagatggttttggaaatgctgaacccgatacattataacatcaccagcatcgtgcctgaagccatgcctgctgccaccatgccagtcctgctcctcactggcctttttctcttggtgtggaattatgagggcacatcctcaataccaggtcctggctactgcatgggaattggacccctcatctcccacggcagattcctgtggatggggatcggcagtgcctgcaactactacaaccgggtgtatggagaattcatgcgagtctggatctctggagaggaaacactcattatcagcaagtcctcaagtatgttccacataatgaagcacaatcattacagctctcgattcggcagcaaacttgggctgcagtgcatcggtatgcatgagaaaggcatcatatttaacaacaatccagagctctggaaaacaactcgacccttctttatgaaagctctgtcaggccccggccttgttcgtatggtcacagtctgtgctgaatccctcaaaacacatctggacaggttggaggaggtgaccaatgaatcgggctatgtggacgtgttgacccttctgcgtcgtgtcatgctggacacctctaacacgctcttcttgaggatccctttggacgaaagtgctatcgtggttaaaatccaaggttattttgatgcatggcaagctctcctcatcaaaccagacatcttctttaagatttcttggctatacaaaaagtatgagaagtctgtcaaggatttgaaagatgccatagaagttctgatagcagaaaaaagatgcaggatttccacagaagagaaactggaagaatgtatggactttgccactgagttgattttagcagagaaacgtggtgacctgacaagagagaatgtgaaccagtgcatattggaaatgctgatcgcagctcctgacaccatgtctgtctctttgttcttcatgctatttctcattgcaaagcaccctaatgttgaagaggcaataataaaggaaatccagactgttattggtgagagagacataaagattgatgatatacaaaaattaaaagtgatggaaaacttcatttatgagagcatgcggtaccagcctgtcgtggacttggtcatgcgcaaagccttagaagatgatgtaatcgatggctacccagtgaaaaaggggacaaacattatcctgaatattggaaggatgcacagactcgagtttttccccaaacccaatgaatttactcttgaaaattttgcaaagaatgttccttataggtactttcagccatttggctttgggccccgtggctgtgcaggaaagtacatcgccatggtgatgatgaaagccatcctcgttacacttctgagacgattccacgtgaagacattgcaaggacagtgtgttgagagcatacagaagatacacgacttgtccttgcacccagatgagactaaaaacatgctggaaatgatctttaccccaagaaactcagacaggtgtctggaacactagagaaggctggtcagtacccactctggagcattttctcatcagtagttcacatacaaatcatccatccttgccaatagtgtcatcctcacagtgaacactcagtggcccatggaattttataggcatacctcctatggttgtcaccaagctaggtgctattggtcatctgctcctgttcacaccagagaaccaggctacaagagaaaaagcagaggccaagagtttgaggggagaaatagtcggtgaagaaaccgtatccataaagacccgattccaccaaatgtgctttgagaaggataggccttcattaacaaaatgtatgtctggttccccagtagagctctactgcctcaaccaaggggatttttatgtctggggcagaaacactcaagttgattagaaagaccaggccaatgtcagggtacctggggccaaacccacctgctagtgtgaattaaagtactttaattttgttttctgtggaggtggaaaagcaacattcatagtctttggagaaatgcttagaaattcagcatttgacccttgctgtgaattaagcccaattaattcctgtttgtctacatatgatctgtctgtggcaaaagtttaatcagaggaaattctttcccagtctgtcgatttatgcctcagccacttgcctgtgctacaattcattgtgttacctgtagattcaggtaatacaaaccatatataatcatcaagtaatacaaactaatttagtaatagcctgggttaagtattattagggccctgtgtctgcatgtagaaaaaaaaattcacatgatgcacttcaaattcaaataaaaatccttttggcatgttcccatttttgcttagctcaattagtgtggctaaccaagagataactgtaaatgtgacattgatttgctcttactacagctacagtgattgggggaggaaaagtcccaacccaatgggctcaaacttctaaggggtactcctctcatccccttatccttctccctcgacattttctccctctttcttcccatgaccccaaagccaagggcaacagatcagtaaagaacgtggtcagagtagaacccctgaagtattttttaatcctacctcaaaatttaacagttacctgagagatttaacattatctagttcattgaatcattgtatgtggtcatggataaattgcacacttgg

SEQ ID NO: 1048 - DNA, 1452 bp; single-stranded, linear
  immediate source library: GENBANK
  immediate source clone: g181243
ttggtttctgctgggtgtaggtccttggctggtcgggctccggtgttctgcttctccccgctgagctgctgcctggtgaagaggaagccatggcgctccgagtcaccaggaactcgaaaattaatgctgaaaataaggcgaagatcaacatggcaggcgcaaagcgcgttcctacggcccctgctgcaacctccaagcccggactgaggccaagaacagctcttggggacattggtaacaaagtcagtgaacaactgcaggccaaaatgcctatgaagaaggaagcaaaaccttcagctactggaaaagtcattgataaaaaactaccaaaacctcttgaaaaggtacctatgctggtgccagtgccagtgtctgagccagtgccagagccagaacctgagccagaacctgagcctgttaaagaagaaaaactttcgcctgagcctattttggttgatactgcctctccaagcccaatggaaacatctggatgtgcccctgcagaagaagacctgtgtcaggctttctctgatgtaattcttgcagtaaatgatgtggatgcagaagatggagctgatccaaacctttgtagtgaatatgtgaaagatatttatgcttatctgagacaacttgaggaagagcaagcagtcagaccaaaatacctactgggtcgggaagtcactggaaacatgagagccatcctaattgactggctagtacaggttcaaatgaaattcaggttgttgcaggagaccatgtacatgactgtctccattattgatcggttcatgcagaataattgtgtgcccaagaagatgctgcagctggttggtgtcactgccatgtttattgcaagcaaatatgaagaaatgtaccctccagaaattggtgactttgcttttgtgactgacaacacttatactaagcaccaaatcagacagatggaaatgaagattctaagagctttaaactttggtctgggtcggcctctacctttgcacttccttcggagagcatctaagattggagaggttgatgtcgagcaacatactttggccaaatacctgatggaactaactatgttggactatgacatggtgcactttcctccttctcaaattgcagcaggagctttttgcttagcactgaaaattctggataatggtgaatggacaccaactctacaacattacctgtcatatactgaagaatctcttcttccagttatgcagcacctggctaagaatgtagtcatggtaaatcaaggacttacaaagcacatgactgtcaagaacaagtatgccacatcgaagcatgctaagatcagcactctaccacagctgaattctgcactagttcaagatttagccaaggctgtggcaaaggtgtaacttgtaaacttgagttggagtactatactttacaaactaaaattggcacatgtgcatctgt

SEQ ID NO: 1049 - DNA, 1680 bp; single-stranded, linear
  immediate source library: GENBANK
  immediate source clone: g181248
gtgctcacccggcccggtgccacccgggtccacagggatgcgaaggagcgggacaccatgaaggaggacggcggcgcggagttctcggctcgctccaggaagaggaaggcaaacgtgaccgtttttttgcaggatccagatgaagaaatggccaaaatcgacaggacggcgagggaccagtgtgggagccagccttgggacaataatgcagtctgtgcagacccctgctccctgatccccacacctgacaaagaagatgatgaccgggtttacccaaactcaacgtgcaagcctcggattattgcaccatccagaggctccccgctgcctgtactgagctgggcaaatagagaggaagtctggaaaatcatgttaaacaaggaaaagacatacttaagggatcagcactttcttgagcaacaccctcttctgcagccaaaaatgcgagcaattcttctggattggttaatggaggtgtgtgaagtctataaacttcacagggagaccttttacttggcacaagatttctttgaccggtatatggcgacacaagaaaatgttgtaaaaactcttttacagcttattgggatttcatctttatttattgcagccaaacttgaggaaatctatcctccaaagttgcaccagtttgcgtatgtgacagatggagcttgttcaggagatgaaattctcaccatggaattaatgattatgaaggcccttaagtggcgtttaagtcccctgactattgtgtcctggctgaatgtatacatgcaggttgcatatctaaatgacttacatgaagtgctactgccgcagtatccccagcaaatctttatacagattgcagagctgttggatctctgtgtcctggatgttgactgccttgaatttccttatggtatacttgctgcttcggccttgtatcatttctcgtcatctgaattgatgcaaaaggtttcagggtatcagtggtgcgacatagagaactgtgtcaagtggatggttccatttgccatggttataagggagacggggagctcaaaactgaagcacttcaggggcgtcgctgatgaagatgcacacaacatacagacccacagagacagcttggatttgctggacaaagcccgagcaaagaaagccatgttgtctgaacaaaatagggcttctcctctccccagtgggctcctcaccccgccacagagcggtaagaagcagagcagcgggccggaaatggcgtgaccaccccatccttctccaccaaagacagttgcgcgcctgctccacgttctcttctgtctgttgcagcggaggcgtgcgtttgcttttacagatatctgaatggaagagtgtttcttccacaacagaagtatttctgtggatggcatcaaacagggcaaagtgttttttattgaatgcttataggttttttttaaataagtgggtcaagtacaccagccacctccagacaccagtgcgtgctcccgatgctgctatggaaggtgctacttgacctaaaggactcccacaacaacaaaagcttgaagctgtggagggccacggtggcgtggctctcctcgcaggtgttctgggctccgttgtaccaagtggagcaggtggttgcgggcaagcgttgtgcagagcccatagccagctgggcagggggctgccctctcc

SEQ ID NO: 1050 - DNA, 3387 bp; single-stranded, linear
  immediate source library: GENBANK
  immediate source clone: g181253
gtccaggaactcctcagcagcgcctccttcagctccacagccagacgccctcagacagcaaagcctacccccgcgccgcgccctgcccgccgctgcgatgctcgcccgcgccctgctgctgtgcgcggtcctggcgctcagccatacagcaaatccttgctgttcccacccatgtcaaaaccgaggtgtatgtatgagtgtgggatttgaccagtataagtgcgattgtacccggacaggattctatggagaaaactgctcaacaccggaatttttgacaagaataaaattatttctgaaacccactccaaacacagtgcactacatacttacccacttcaagggattttggaacgttgtgaataacattcccttccttcgaaatgcaattatgagttatgtgttgacatccagatcacatttgattgacagtccaccaacttacaatgctgactatggctacaaaagctgggaagccttctctaacctctcctattatactagagcccttcctcctgtgcctgatgattgcccgactcccttgggtgtcaaaggtaaaaagcagcttcctgattcaaatgagattgtgggaaaattgcttctaagaagaaagttcatccctgatccccagggctcaaacatgatgtttgcattctttgcccagcacttcacgcatcagtttttcaagacagatcataagcgagggccagctttcaccaacgggctgggccatggggtggacttaaatcatatttacggtgaaactctggctagacagcgtaaactgcgccttttcaaggatggaaaaatgaaatatcagataattgatggagagatgtatcctcccacagtcaaagatactcaggcagagatgatctaccctcctcaagtccctgagcatctacggtttgctgtggggcaggaggtctttggtctggtgcctggtctgatgatgtatgccacaatctggctgagggaacacaacagagtatgcgatgtgcttaaacaggagcatcctgaatggggtgatgagcagttgttccagacaagcaggctaatactgataggagagactattaagattgtgattgaagattatgtgcaacacttgagtggctatcacttcaaactgaaatttgacccagaactacttttcaacaaacaattccagtaccaaaatcgtattgctgctgaatttaacaccctctatcactggcatccccttctgcctgacacctttcaaattcatgaccagaaatacaactatcaacagtttatctacaacaactctatattgctggaacatggaattacccagtttgttgaatcattcaccaggcaaattgctggcagggttgctggtggtaggaatgttccacccgcagtacagaaagtatcacaggcttccattgaccagagcaggcagatgaaataccagtcttttaatgagtaccgcaaacgctttatgctgaagccctatgaatcatttgaagaacttacaggagaaaaggaaatgtctgcagagttggaagcactctatggtgacatcgatgctgtggagctgtatcctgcccttctggtagaaaagcctcggccagatgccatctttggtgaaaccatggtagaagttggagcaccattctccttgaaaggacttatgggtaatgttatatgttctcctgcctactggaagccaagcacttttggtggagaagtgggttttcaaatcatcaacactgcctcaattcagtctctcatctgcaataacgtgaagggctgtccctttacttcattcagtgttccagatccagagctcattaaaacagtcaccatcaatgcaagttcttcccgctccggactagatgatatcaatcccacagtactactaaaagaacgttcgactgaactgtagaagtctaatgatcatatttatttatttatatgaaccatgtctattaatttaattatttaataatatttatattaaactccttatgttacttaacatcttctgtaacagaagtcagtactcctgttgcggagaaaggagtcatacttgtgaagacttttatgtcactactctaaagattttgctgttgctgttaagtttggaaaacagtttttattctgttttataaaccagagagaaatgagttttgacgtctttttacttgaatttcaacttatattataaggacgaaagtaaagatgtttgaatacttaaacactatcacaagatgccaaaatgctgaaagtttttacactgtcgatgtttccaatgcatcttccatgatgcattagaagtaactaatgtttgaaattttaaagtacttttgggtatttttctgtcatcaaacaaaacaggtatcagtgcattattaaatgaatatttaaattagacattaccagtaatttcatgtctactttttaaaatcagcaatgaaacaataatttgaaatttctaaattcatagggtagaatcacctgtaaaagcttgtttgatttcttaaagttattaaacttgtacatataccaaaaagaagctgtcttggatttaaatctgtaaaatcagatgaaattttactacaattgcttgttaaaatattttataagtgatgttcctttttcaccaagagtataaacctttttagtgtgactgttaaaacttccttttaaatcaaaatgccaaatttattaaggtggtggagccactgcagtgttatctcaaaataagaatatcctgttgagatattccagaatctgtttatatggctggtaacatgtaaaaaccccataaccccgccaaaaggggtcctacccttgaacataaagcaataaccaaaggagaaaagcccaaattattggttccaaatttagggtttaaactttttgaagcaaacttttttttagccttgtgcactgcagacctggtactcagattttgctatgaggttaatgaagtaccaagctgtgcttgaataacgatatgttttctcagattttctgttgtacagtttaatttagcagtccatatcacattgcaaaagtagcaatgacctcataaaatacctcttcaaaatgcttaaattcatttcacacattaattttatctcagtcttgaagccaattcagtaggtgcattggaatcaagcctggctacctgcatgctgttccttttcttttcttcttttagccattttgctaagagacacagtcttctcaaacacttcgtttctcctattttgttttactagttttaagatcagagttcactttctttggactctgcctatattttcttacctgaacttttgcaagttttcaggtaaacctcagctcaggactgctatttagctcctcttaagaagattaaaaaaaaaaaaaaag

SEQ ID NO: 1051 - DNA, 1231 bp; single-stranded, linear
  immediate source library: GENBANK
  immediate source clone: g181271
aggtctcagccggtcgtcgcgacgttcgcccgctcgctctgaggctcctgaagccgaaactagctagactttcctccttcccgcctgcctgtagcggcgttgttgccactccgccaccatgttcgaggcgcgcctggtccagggctccatcctcaagaaggtgttggaggcactcaaggacctcatcaacgaggcctgctgggatattagctccagcggtgtaaacctgcagagcatggactcgtcccacgtctctttggtgcagctcaccctgcggtctgagggcttcgacacctaccgctgcgaccgcaacctggccatgggcgtgaacctcaccagtatgtccaaaatactaaaatgcgccggcaatgaagatatcattacactaagggccgaagataacgcggataccttggcgctagtatttgaagcaccaaaccaggagaaagtttcagactatgaaatgaagttgatggatttagatgttgaacaacttggaattccagaacaggagtacagctgtgtagtaaagatgccttctggtgaatttgcacgtatatgccgagatctcagccatattggagatgctgttgtaatttcctgtgcaaaagacggagtgaaattttctgcaagtggagaacttggaaatggaaacattaaattgtcacagacaagtaatgtcgataaagaggaggaagctgttaccatagagatgaatgaaccagttcaactaacttttgcactgaggtacctgaacttctttacaaaagccactccactctcttcaacggtgacactcagtatgtctgcagatgtaccccttgttgtagagtataaaattgcggatatgggacacttaaaatactacttggctcccaagatcgaggatgaagaaggatcttaggcattcttaaaattcaagaaaataaaactaagctctttgagaactgcttctaagatgccagcatatactgaagtcttttctgtcaccaaatttgtacctctaagtacatatgtagatattgttttctgtaaataacctattttttttctctattctctccaatttgtttaaagaataaagtccaaagtctgatctggtctagttaacctagaagtatttttgtctcttagaaatacttgtgatttttataatacaaaagggtcttgactctaaatgcagttttaagaagtgtttttgaatttaaataaagttacttgaatttcaaac

SEQ ID NO: 1052 - DNA, 2565 bp; single-stranded, linear
  immediate source library: GENBANK
  immediate source clone: g181275
tgatccttgtgatcccaggctccaagagtccacccttcccagctcagctcagtacctcagccacctccaagatccctacactgatcatgcttttcccaatctccatgtcggccacggagtttcttctggcctctgtcatcttctgtctggtattctgggtaatgagggcctcaagacctcaggtccccaaaggcctgaagaatccaccagggccatggggctggcctctgattgggcacatgctgaccctgggaaagaacccgcacctggcactgtcaaggatgagccagcagtatggggacgtgctgcagatccgaattggctccacacccgtggtggtgctgagcggcctggacaccatccggcaggccctggtgcggcagggcgatgatttcaagggccggcccgacctctacaccttcaccctcatcagtaatggtcagagcatgtccttcagcccagactctggaccagtgtgggctgcccgccggcgcctggcccagaatggcctgaaaagtttctccattgcctctgacccagcctcctcaacctcctgctacctggaagagcatgtgagcaaggaggctgaggtcctgataagcacgttgcaggagctgatggcagggcctgggcactttaacccctacaggtatgtggtggtatcagtgaccaatgtcatctgtgccatttgctttggccggcgctatgaccacaaccaccaagaactgcttagcctagtcaacctgaataataatttcggggaggtggttggctctggaaacccagctgagttcatccctattcttcgctacctacccaacccttccctgaatgccttcaaggacctgaatgagaagttctacagcttcatgcagaagatggtcaaggagcactacaaaacctttgagaagggccacatccgggacatcacagacagcctgattgagcactgtcaggagaagcagctggatgagaacgccaatgtccagctgtcagatgagaagatcattaacatcgtcttggacctctttggagctgggtttgacacagtcacaactgctatctcctggagcctcatgtatttggtgatgaaccccagggtacagagaaagatccaagaggagctagacacagtgattggcaggtcacggcggccccggctctctgacagatcccatctgccctatatggaggccttcatcctggagaccttccgacactcttccttcgtccccttcaccatcccccacagcacaacaagagacacaagtttgaaaggcttttacatccccaaggggcgttgtgtctttgtaaaccagtggcagatcaaccatgaccagaagctatgggtcaacccatctgagttcctacctgaacggtttctcacccctgatggtgctatcgacaaggtgttaagtgagaaggtgattatctttggcatgggcaagcggaagtgtatcggtgagaccgttgcccgctgggaggtctttctcttcctggctatcctgctgcaacgggtggaattcagcgtgccactgggcgtgaaggtggacatgacccccatctatgggctaaccatgaagcatgcctgctgtgagcacttccaaatgcagctgcgctcttaggtgcttgagagccctgaggcctagactctgtctacctggtctggttgggcagccagaccagcaggctggcctatgtggtctaagattcagcctgaaactcatagacactgatctggctgcagttttgctatctgggctgtgggcaagcctaagggatcctgcctgcccctaccctggacttgcctctgcacaccctccagagacaacaggtaaaacagggccacatagatgctgatggagccttcccaagttgtgcttgagccaggaggcctgctagggttaggaggtccttaggcctctgagaagctctgaagaactctctggaagcccctgggcccagtacctagctggctctgtgagggtgctgactggcttcagcaagttagaactagccaaaccaggaccctgtccaatctttgacaattgggagctgccaagagtgaagggaagagacagcccaggatactggcacagaggtagtctcactgcttgaactaggctgagcaatctgaccctatgggtctaggacacagttcctgggaacatcacattcctctgcccttcctgcaggcaggaacaaacagggctgccttctggccttgtaagacccttattgctgtcctggaggggctggggacttgtgtctgcggggatcagagcgcacagggagtgcacatatccaggcaccaggactagggctggagtgaggggggggtatttcaattaccttctattggtctcccttctctacactcttgtaataaaatgtctatttttaatgtttgtacacaacaatccttctattctagcctgcattgagcttgcatgcttgcataagagcttaagaaccattgatttaatgtaatagggaaaattctaacccaggtatccaaaaatgtgtaagaacaactacctgagctaaataaagatattgttcaga

SEQ ID NO: 1053 - DNA, 2907 bp; single-stranded, linear
  immediate source library: GENBANK
  immediate source clone: g181293
ggaaccatggagctcagcgtcctcctcttccttgcactcctcacaggcctcttgctactcctggttcagcgtcaccctaactcccatggcaccctcccaccagggccccgccctctgccccttttggggaaccttctgcagatggacagaagaggcctactcaaatcctttctgaggttccgagagaaatatggggacgtcttcacggtacacctgggaccgaggcccgtggtcatgctgtgtggagtagaggccatacgggaggccctggtggacaacgctgaggccttctctggccggggaaaaatcgtcatcatggacccagtctaccagggatatggcatgctctttgccaatggaaaccgctggaaggtgcttcggcgattctctgtgaccaccatgagggacttcgggatgggaaagcggagtgtggaggagcggattcaggacgaggctcagtgtctgatagaggaacttcggaaatccaagggagccctcgtggaccccaccttcctcttccattccattaccgccaacatcatctgctccatcatctttggaaaacgcttccactaccaagatcaagagttcctgaagacgctgaacttgttctgccagagtttcttactcatcagctctatatccagccagctgtttgagctcttctctggcttcttgaaatactttcctggggcacacaggcaagtttacaaaaacctacaggaaatcaatgcttacattggccacagtgtggagaagcaccgtgaaaccctggaccccagcgcccccagggacctcatcgacacctacctgctccacatggaaaaagagaaatccaacccacacagtgaattcagccaccagaacctcatcatcaacacgctctcgctcttctttgctggcactgagaccaccagcaccactctccgctacggcttcctgctcatgctcaaataccctcatgtcgcagagagagtctacaaggagattgaacaggtggttggcccacatcgccctccagcgcttgatgaccgagccaaaatgccatacacagaggcagtcatccgtgagattcagagatttgctgaccttctccccatgggtgtgccccacattgtcacccaacacaccagcttctgagggtacaccatccccaaggacacggaagtatttctcatcctgagcactgctctccgtgacccacactactttgaaaaaccagacgccttcaatcctgaccactttctggatgccaatggggcactgaaaaagaatgaagcttttatccccttctccttagggaagcggatttgtcttggtgaaggcattgcccgtgcggaattgttcctcttcttcaccaccatcctccagaacttctccgtggccagccccgtggctcctgaagacatcgatctgacaccccaggagtgtggtgtgggcaaaatacccccaacataccagatctgcttcctgccccgctgaaggggctgagggaagggggtcaaaggattccagggtcattcagtgtccccacctctgtagataatggctctgactccctgcaacttcctgcctctgagagacctgctgcaagccagcttccttcccttccatggcaccagttgtctgaggtcgcagtgcaaatgagtggaggagtgagattattgaaaattataatatacaaaattatatatatatattttgagacagagtctcactcagttgcccaggctggagtgcagtggcgtgatctcggctcactgcaacctccacccccggggttcaagaaattctcctgcctcagcctccctagtagctgggattacaggtgtgtgctaccatgcctggctaatttttgtatttttagtagagatggggtttcaccgtgttggccaggctgatctcaaactcctgaactcaagtgattcacccaccttagcctcccaaagtgctgggattacaggtgtgagtcaccatgcccggccatgtatatatataattttaaaaattaagatgaaattcacataaaataaaattagccattttaaagtgtacaatttagtggtgtgtggttcattcacaaagctgtacaaccaccaccatctagttccaaacattttctttttttctgagacggagtctcactctgtcacccaggttcgagttcagtggtcttgaactcctgatgtcaggtgattctcctagttccaaatgttttcattatctctcccccaacaaaacccatacctatcaagctgtcactccccataccccattctctttttcatctcagcccctgtcaatctggtttttgtccttatggacttaccaattctgaatatttcctataaacagaatcacacaatatttgattttttttttaaaactaagccttgctctgtctcccaggctggagtgctgtggcgtgattttggttcactgcaacctccgccttccaagttcaagagattctcctgcctcagcttccaagtagctgggattacaggcatgtggtaccacgcctggctaattttcttgtatttttagtagggacatgttggccaggctggttgtgagctcctggcctcaggtgatccacacgcctcagtgtcccagagtgctgatattacaggcgtaatatgtgatcttttgtgtctggttcctttcacgttgaacgctatttttgaggttcgtgcctgttgtagaccacagtcacacactgctgtagtcttcccccatcctcattcccagctgcctcctcctactgtttccctctatcaaaaagcctccttggcgcaggttccctgagctgtgggattctgcactggtgctttggattccctgatatgttccttcaaatccactgagaattaaataaacatcgctaaagcctgacctccccacgtc

SEQ ID NO: 1054 - DNA, 1276 bp; single-stranded, linear
  immediate source library: GENBANK
  immediate source clone: g181297
ggaaggagatccggcgtttctgcctcataactctgcggaattttgggatggggaagaggagcatcgaggaccgtgttcaagaggaagcccgctgccttgtggaggagttgagaaaaaccaatgcctcaccctgtgatcccactttcatcctgggctgtgctccctgcaatgtgatctgctccattattttccataaacgattcgattataaagatcagcaatttcttaacttgatggaaaaattgaatgaaaacatcaggattgtaagcaccccctggatccagatatgcaataatttttccactatcattgattatttcccgggaagtcataacaaattacttaaaaatttgcttacattgaaaagttatgtattggagagaataaaagaacatcaagaatccctggacatgaacaaccctcgggactttattgattgtttcctgatcaaaatggaacaggaaaagcacaatcaacagtctgaatttactgttgaaagcttgatagccactgtaactgatatgtttggggctggaacagagacaacaagcacaaccctgagatatgctctccttctcctgctgaagcacccagaggtcacagctaaagtccaggaagagattgaacgtgtagttggcagaaaccggagcccctgcatgcaggacaggagccacatgccctacacagatgctgtggtgcacgaggtccagagatacattgacctcatccccaccagcctgccccatgcagtgacctgtgacgttaaattcagaaactacctcattcccaagggcacaaccatattaacttccctcacttctgtgctacatgacaacaaagaatttcccaacccagagatgtttgaccctcgtcactttctggatgaaggtggaaattttaagaaaagtaactacttcatgcctttctcagcaggaaaacggatttgtgtgggagagggcctggcccgcatggagctgtttttattcctgaccttcattttacagaactttaacctgaaatctctgattgacccaaaggaccttgacacaactcctgttgtcaatggatttgcttctgtcccgcccttctatcagctgtgcttcattcctgtctgaagaagcacagatggtctggctgctcctgtgctgtccctgcagctctctttcctctggtccaaatttcactatctgtgatgcttcttctgacccgtcatctcacattttcccttcccccaagatctagtgaacattcagcctccattaaaaaagtttcacgg

SEQ ID NO: 1055 - DNA, 1995 bp; single-stranded, linear
  immediate source library: GENBANK
  immediate source clone: g181299
ggcaccggaaagaacaagaaaaaagaacaccttatttttatcttcttcagtgagccaatgttcattcaaaagagagattaaagtgctttttgctgactagtcacagtcagagtcagaatcacaggtggattagtagggagtgttataaaagccttgaagtgaaagcccgcagttgtcttactaagaagagaagccttcaatggatccagctgtggctctggtgctctgtctctcctgtttgtttctcctttcactctggaggcagagctctggaagagggaggctcccgtctggccccactcctctcccgattattggaaatatcctgcagttagatgttaaggacatgagcaaatccttaaccaatttctcaaaagtctatggccctgtgttcactgtgtattttggcctgaagcccattgtggtgttgcatggatatgaagcagtgaaggaggccctgattgatcatggagaggagttttctggaagaggaagttttccagtggctgaaaaagttaacaaaggacttggaatccttttcagcaatggaaagagatggaaggagatccggcgtttctgcctcatgactctgcggaattttgggatggggaagaggagcatcgaggaccgtgttcaagaggaagcccgctgccttgtggaggagttgagaaaaaccaatgcctcaccctgtgatcccactttcatcctgggctgtgctccctgcaatgtgatctgctctgttattttccatgatcgatttgattataaagatcagaggtttcttaacttgatggaaaaattcaatgaaaacctcaggattctgagctctccatggatccaggtctgcaataatttccctgctctcatcgattatctcccaggaagtcataataaaatagctgaaaattttgcttacattaaaagttatgtattggagagaataaaagaacatcaagaatccctggacatgaacagtgctcgggactttattgattgtttcctgatcaaaatggaacaggaaaagcacaatcaacagtctgaatttactgttgaaagcttgatagccactgtaactgatatgtttggggctggaacagagacaacgagcaccactctgagatatggactcctgctcctgctgaagtacccagaggtcacagctaaagtccaggaagagattgaatgtgtagttggcagaaaccggagcccctgtatgcaggacaggagtcacatgccctacacagatgctgtggtgcacgagatccagagatacattgacctcctccccaccaacctgccccatgcagtgacctgtgatgttaaattcaaaaactacctcatccccaagggcacgaccataataacatccctgacttctgtgctgcacaatgacaaagaattccccaacccagagatgtttgaccctggccactttctggataagagtggcaactttaagaaaagtgactacttcatgcctttctcagcaggaaaacggatgtgtatgggagagggcctggcccgcatggagctgtttttattcctgaccaccattttgcagaactttaacctgaaatctcaggttgacccaaaggatattgacatcacccccattgccaatgcatttggtcgtgtgccacccttgtaccagctctgcttcattcctgtctgaagaagggcagatagtttggctgctcctgtgctgtcacctgcaattctcccttatcagggccattagcctctcccttctctctgtgagggatattttctctgacttgtcaatccacatcttcccattccctcaagatccaatgaacatccaacctccattaaagagagtttcttgggtcacttcctaaatatatctgctattctccatactctgtatcacttgtattgaccaccacatatgctaatacctatctactgctgagttgtcagtatgttatcactagaaaacaaagaaaaatgattaataaatgacaattcagagcc

SEQ ID NO: 1056 - DNA, 1854 bp; single-stranded, linear
  immediate source library: GENBANK
  immediate source clone: g181301
gagaaggcttcaatggattctcttgtggtccttgtgctctgtctctcatgtttgcttctcctttcactctggagacagagctctgggagaggaaaactccctcctggccccactcctctcccagtgattggaaatatcctacagataggtattaaggacatcagcaaatccttaaccaatctctcaaaggtctatggccctgtgttcactctgtattttggcctgaaacccatagtggtgctgcatggatatgaagcagtgaaggaagccctgattgatcttggagaggagttttctggaagaggcattttcccactggctgaaagagctaacagaggatttggaattgttttcagcaatggaaagaaatggaaggagatccggcgtttctccctcatgacgctgcggaattttgggatggggaagaggagcattgaggaccgtgttcaagaggaagcccgctgccttgtggaggagttgagaaaaaccaaggcctcaccctgtgatcccactttcatcctgggctgtgctccctgcaatgtgatctgctccattattttccataaacgttttgattataaagatcagcaatttcttaacttaatggaaaagttgaatgaaaacatcaagattttgagcagcccctggatccagatctgcaataatttttctcctatcattgattacttcccgggaactcacaacaaattacttaaaaacgttgcttttatgaaaagttatattttggaaaaagtaaaagaacaccaagaatcaatggacatgaacaaccctcaggactttattgattgcttcctgatgaaaatggagaaggaaaagcacaaccaaccatctgaatttactattgaaagcttggaaaacactgcagttgacttgtttggagctgggacagagacgacaagcacaaccctgagatatgctctccttctcctgctgaagcacccagaggtcacagctaaagtccaggaagagattgaacgtgtgattggcagaaaccggagcccctgcatgcaagacaggagccacatgccctacacagatgctgtggtgcacgaggtccagagataccttgaccttctccccaccagcctgccccatgcagtgacctgtgacattaaattcagaaactatctcattcccaagggcacaaccatattaatttccctgacttctgtgctacatgacaacaaagaatttcccaacccagagatgtttgaccctcatcactttctggatgaaggtggcaattttaagaaaagtaaatacttcatgcctttctcagcaggaaaacggatttgtgtgggagaagccctggccggcatggagctgtttttattcctgacctccattttacagaactttaacctgaaatctctggttgacccaaagaaccttgacaccactccagttgtcaatggttttgcctctgtgccgcccttctaccagctgtgcttcattcctgtctgaagaagagcagatggcctggctgctgctgtgcagtccctgcagctctctttcctctggggcattatccatctttcactatctgtaatgccttttctcacctgtcatctcacattttcccttccctgaagatctagtgaacattcgaccttcattacggagagtttcctatgtttcactgtgcaaatatatctgctattctccatactctgtaacagttgcattgactgtcacataatgctcatacttatctaatgttgagttattaatatgttattattaaatagagaaatatgatttgtgtattataattcaaaggcatttcttttctgcatgttctaaataaaaagcattattatttgctgaaaaaaa

SEQ ID NO: 1057 - DNA, 1845 bp; single-stranded, linear
  immediate source library: GENBANK
  immediate source clone: g181302
gaaggcttcaatggattctcttgtggtccttgtgctctgtctctcatgtttgcttctcctttcactctggagacagagctctgggagaggaaaactccctcctggccccactcctctcccagtgattggaaatatcctacagataggtattaaggacatcagcaaatccttaaccaatctctcaaaggtctatggccctgtgttcactctgtattttggcctgaaacccatagtggtgctgcatggatatgaagcagtgaaggaagccctgattgatcttggagaggagttttctggaagaggcattttcccactggctgaaagagctaacagaggatttggaattgttttcagcaatggaaagaaatggaaggagatccggcgtttctccctcatgacgctgcggaattttgggatggggaagaggagcattgaggaccgtgttcaagaggaagcccgctgccttgtggaggagttgagaaaaaccaaggcctcaccctgtgatcccactttcatcctgggctgtgctccctgcaatgtgatctgctccattattttccataaacgttttgattataaagatcagcaatttcttaacttaatggaaaagttgaatgaaaacatcaagattttgagcagcccctggatccagatctgcaataatttttctcctatcattgattacttcccgggaactcacaacaaattacttaaaaacgttgcttttatgaaaagttatattttggaaaaagtaaaagaacaccaagaatcaatggacatgaacaaccctcaggactttattgattgcttcctgatgaaaatggagaaggaaaagcacaaccaaccatctgaatttactattgaaagcttggaaaacactgcagttgacttgtttggagctgggacagagacgacaagcacaaccctgagatatgctctccttctcctgctgaagcacccagaggtcacagctaaagtccaggaagagattgaacgtgtgattggcagaaaccggagcccctgcatgcaagacaggagccacatgccctacacagatgctgtggtgcacgaggtccagagatacattgaccttctccccaccagcctgccccatgcagtgacctgtgacattaaattcagaaactatctcattcccaagggcacaaccatattaatttccctgacttctgtgctacatgacaacaaagaatttcccaacccagagatgtttgaccctcatcactttctggatgaaggtggcaattttaagaaaagtaaatacttcatgcctttctcagcaggaaaacggatttgtgtgggagaagccctggccggcatggagctgtttttattcctgacctccattttacagaactttaacctgaaatctctggttgacccaaagaaccttgacaccactccagttgtcaatggatttgcctctgtgccgcccttctaccagctgtgcttcattcctgtctgaagaagagcagatggcctggctgctgctgtgcagtccctgcagctctctttcctctggggcattatccatctttcactatctgtaatgccttttctcacctgtcatctcacattttcccttccctgaagatctagtgaacattcgacctccattacggagagtttcctatgtttcactgtgcaaatatatctgctattctccatactctgtaacagttgcattgactgtcacataatgctcatacttatctaatgttgagttattaatatgttattattaaatagagaaatatgatttgtgtattataattcaaaggcatttcttttctgcatgttctaaataaaaagcattattatttgctg

SEQ ID NO: 1058 - DNA, 1736 bp; single-stranded, linear
  immediate source library: GENBANK
  immediate source clone: g181341
actccactgctgtctatcttgcctgccggcacccagccaccatgtgggagctcgtggctctcttgctgcttaccctagcttatttgttttggcccaagagaaggtgccctggtgccaagtaccccaagagcctcctgtccctgcccctggtgggcagcctgccattcctccccagacatggccatatgcataacaacttcttcaagctgcagaaaaaatatggccccatctattctgttcgtatgggcaccaagactacagtgattgtcggccaccaccagctggccaaggaggtgcttattaagaagggcaaggacttctctgggcggcctcaaatggcaactctagacatcgcgtccaacaaccgtaagggtatcgccttcgctgactctggcgcacactggcagctgcatcgaaggctggcgatggccacctttgccctgttcaaggatggcgatcagaagctggagaagatcatttgtcaggaaatcagtacattgtgtgatatgctggccacccacaacggacagtccatagacatctcctttcctgtcttcgtggcggtaaccaatgtcatctccttgatctgcttcaatacctcctacaagaatggggaccctgagttgaatgtcatacagaattacaatgaaggcatcatagacaacctgagcaaagacagcctggtggacctagtcccctggttgaagattttccccaacaaaaccctggaaaaattaaagagccatgttaaaatacgaaatgatctgctgaataaaatacttgaaaattacaaggagaaattccggagtgactctatcaccaacatgctggacacactgatgcaagccaagatgaactcagataatggcaatgctggcccagatcaagattcagagctgctttcagataaccacattctcaccaccataggggacatctttggggctggcgtggagaccaccacctctgtggttaaatggaccctggccttcctgctgcacaatcctcaggtgaagaagaagctctacgaggagattgaccagaatgtgggtttcagccgcacaccaactatcagtgaccgtaaccgtctcctcctgctggaggccaccatccgagaggtgcttcgcctcaggcccgtggcccctatgctcatcccccacaaggccaacgttgactccagcatcggtgagtttgctgtggacaagggcacagaagttatcatcaatctgtgggcgctgcatcacaatgagaaggagtggcaccagccggatcagttcatgcctgagcgtttcttgaatccagcggggacccagctcatctcaccgtcagtaagctatttgcccttcggagcaggacctcgctcctgtataggtgagatcctggcccgccaggagctcttcctcatcatggcctggctgctgcagaggttcgacctggaggtgccagatgatgggcagctgccctccctggaaggcatccccaaggtggtctttctgatcgactctttcaaagtgaagatcaaggtgcgccaggcctggagggaagcccaggctgagggtagcacctaaaggctgtaactcacagcccctgtccaccctatgtggccccacaacacagatttagagatacaaccccccacccttctccgccattcttccctactcccaacccactctgccttctttttcagcttgtggcaatgccagtgatgtgcataaacagttttttttttttcc

SEQ ID NO: 1059 - DNA, 1746 bp; single-stranded, linear
  immediate source library: GENBANK
  immediate source clone: g181343
cttcaatggatccttttgtggtccttgtgctctgtctctcatgtttgcttctcctttcaatctggagacagagctctgggagaggaaaactccctcctggccccactcctctcccagtgattggaaatatcctacagatagatattaaggatgtcagcaaatccttaaccaatctctcaaaaatctatggccctgtgttcactctgtattttggcctggaacgcatggtggtgctgcatggatatgaagtggtgaaggaagccctgattgatcttggagaggagttttctggaagaggccatttcccactggctgaaagagctaacagaggatttggaatcgttttcagcaatggaaagagatggaaggagatccggcgtttctccctcatgacgctgcggaattttgggatggggaagaggagcattgaggaccgtgttcaagaggaagcccgctgccttgtggaggagttgagaaaaaccaaggcttcaccctgtgatcccactttcatcctgggctgtgctccctgcaatgtgatctgctccattattttccagaaacgtttcgattataaagatcagcaatttcttaacttgatggaaaaattgaatgaaaacatcaggattgtaagcaccccctggatccagatatgcaataattttcccactatcattgattatttcccgggaacccataacaaattacttaaaaaccttgcttttatggaaagtgatattttggagaaagtaaaagaacaccaagaatcgatggacatcaacaaccctcgggactttattgattgcttcctgatcaaaatggagaaggaaaagcaaaaccaacagtctgaattcactattgaaaacttggtaatcactgcagctgacttacttggagctgggacagagacaacaagcacaaccctgagatatgctctccttctcctgctgaagcacccagaggtcacagctaaagtccaggaagagattgaacgtgtcattggcagaaaccggagcccctgcatgcaggacaggggccacatgccctacacagatgctgtggtgcacgaggtccagagatacatcgacctcatccccaccagcctgccccatgcagtgacctgtgacgttaaattcagaaactacctcattcccaagggcacaaccatattaacttccctcacttctgtgctacatgacaacaaagaatttcccaacccagagatgtttgaccctcgtcactttctggatgaaggtggaaattttaagaaaagtaactacttcatgcctttctcagcaggaaaacggatttgtgtgggagagggcctggcccgcatggagctgtttttattcctgaccttcattttacagaactttaacctgaaatctctgattgacccaaaggaccttgacacaactcctgttgtcaatggatttgcttctgtcccgcccttctatcagctgtgcttcattcctgtctgaagaagcacagatggtctggctgctcctgtgctgtccctgcagctctctttcctctggtccaaatttcactatctgtgatgcttcttctgacccgtcatctcacattttcccttcccccaagatctagtgaacattcagcctccattaaaaaagtttcactgtgcaaatatatctgctattccccatactctataatagttacattgagtgccacataatgctgatacttgtctaatgttgagttattaacatattattattaaataga

SEQ ID NO: 1060 - DNA, 1707 bp; single-stranded, linear
  immediate source library: GENBANK
  immediate source clone: g181345
gggaagctccaggcaaacagcccagcaaacagcagcactcagctaaaaggaagactcacagaacacagttgaagaaggaaagtggcgatggacctcatcccaaatttggcggtggaaacctggcttctcctggctgtcagcctggtgctcctctatctatatgggacccgtacacatggactttttaagagactgggaattccagggcccacacctctgcctttgttgggaaatgttttgtcctatcgtcagggtctctggaaatttgacacagagtgctataaaaagtatggaaaaatgtggggaacgtatgaaggtcaactccctgtgctggccatcacagatcccgacgtgatcagaacagtgctagtgaaagaatgttattctgtcttcacaaatcgaaggtctttaggcccagtgggatttatgaaaagtgccatctctttagctgaggatgaagaatggaagagaatacggtcattgctgtctccaaccttcaccagcggaaaactcaaggagatgttccccatcattgcccagtatggagatgtattggtgagaaacttgaggcgggaagcagagaaaggcaagcctgtcaccttgaaagacatctttggggcctacagcatggatgtgattactggcacatcatttggagtgaacatcgactctctcaacaatccacaagacccctttgtggagagcactaagaagttcctaaaatttggtttcttagatccattatttctctcaataatactctttccattccttaccccagtttttgaagcattaaatgtctctctgtttccaaaagataccataaattttttaagtaaatctgtaaacagaatgaagaaaagtcgcctcaacgacaaacaaaagcaccgactagatttccttcagctgatgattgactcccagaattcgaaagaaactgagtcccacaaagctctgtctgatctggagctcgcagcccagtcaataatcttcatttttgctggctatgaaaccaccagcagtgttctttccttcactttatatgaactggccactcaccctgatgtccagcagaaactgcaaaaggagattgatgcagttttgcccaataaggcaccacctacctatgatgccgtggtacagatggagtaccttgacatggtggtgaatgaaacactcagattattcccagttgctattagacttgagaggacttgcaagaaagatgttgaaatcaatggggtattcattcccaaagggtcaatggtggtgattccaacttatgctcttcaccatgacccaaagtactggacagagcctgaggagttccgccctgaaaggttcagtaagaagaaggacagcatagatccttacatatacacaccctttggaactggacccagaaactgcattggcatgaggtttgctctcatgaacatgaaacttgctctaatcagagtccttcagaacttctccttcaaaccttgtaaagaaacacagatccccttgaaattagacacgcaaggacttcttcaaccagaaaaacccattgttctaaaggtggattcaagagatggaaccctaagtggagaatgagttattctaaggacttctactttggtcttcaagaaagctgtgccccagaacaccagagatttcaacttagtcaataaaaccttgaaataaagatgggcttaatctaatgta

SEQ ID NO: 1061 - DNA, 1825 bp; single-stranded, linear
  immediate source library: GENBANK
  immediate source clone: g181357
gcaggctcagcgcatcccagccagtgtctcctgcagctcagcagctgccttcaccatggacagcataagcacagccatcttactcctgctcctggctctcgtctgtctgctcctgaccctaagctcaagagataagggaaagctgcctccgggacccagacccctctcaatcctgggaaacctgctgctgctttgctcccaagacatgctgacttctctcactaagctgagcaaggagtatggctccatgtacacagtgcacctgggacccaggcgggtggtggtcctcagcgggtaccaagctgtgaaggaggccctggtggaccagggagaggagtttagtggccgcggtgactaccctgcctttttcaactttaccaagggcaatggcatcgccttctccagtggggatcgatggaaggtcctgagacagttctctatccagattctacggaatttcgggatggggaagagaagcattgaggagcgaatcctagaggagggcagcttcctgctggcggacgtgcggaaaactgaaggcgagccctttgaccccacgtttgtgctgagtcgctcagtgtccaacattatctgttccgtgctcttcggcagccgcttcgactatgatgatgagcgtctgctcaccattatccgccttatcaatgacaacttccaaatcatgagcagcccctggggcgagttgtacgacatcctagaccccagattcccgagcctcctggactgggtgcctgggccgcaccaacgcatcttccagaacttcaagtgcctgagagacctcatcgcccacagcgtccacgaccaccaggcctcgtctccccgggacttcatccagtgcttcctcaccaagatggcagaggagaaggaggacccactgagccacttccacatggataccctgctgatgaccacacataacctgctctttggcggcaccaagacggtgagcaccacgctgcaccacgccttcctggcactcatgaagtacccaaaagttcaagcccgcgtgcaggaggagatcgacctcgtggtgggacgcgcgcggctgccggcgctgaaggaccgcgcggccatgccttacacagacgcggtgatccacgaggtgcagcgctttgcagacatcatccccatgaacttgccgcaccgcgtcactagggacacggcctttcgcggcttcctgatacccaagggcaccgatgtcatcaccctccttaacaccgtccactacgaccccagccagttcctgacgccccaggagttcaaccccgagcattttttggatgccaatcagtccttcaagaagagtccagccttcatgcccttctcagctgggcgccgtctgtgcctgggagagctgctggcgcgcatggagctctttctgtacctcaccgccatcctgcagagcttttcgctgcagccgctgggtgcgcccgaggacatcgacctgaccccactcagctcaggtcttggcaatttgccgcggcctttccagctgtgcctgcgcccgcgctaacgccccggcccttccagattcgcctgtgagcgatgaggcccacccatgtgggttgctacgtccccttcttggtccacagtctgccctcatccctctggcagtcacgctgtcttccctgcatgctgtgcctgccgcgtgcccttcccccatccctccaatctgtgccccgtctgcagggcagaggcagatgtggcatgtctttttgtacccacagagcttgttctatggcacgcccttttctaggctttttgtatcatttcttagtacattgtaatagattcaaaccagtcttgg

SEQ ID NO: 1062 - DNA, 2059 bp; single-stranded, linear
  immediate source library: GENBANK
  immediate source clone: g181373
gcaggaaagctccatgcacatagcccagcaaagagcaacacagagctgaaaggaagactcagaggagagagataagtaaggaaagtagtgatggctctcatcccagacttggccatggaaacctggcttctcctggctgtcagcctggtgctcctctatctatatggaacccattcacatggactttttaagaagcttggaattccagggcccacacctctgccttttttgggaaatattttgtcctaccataagggcttttgtatgtttgacatggaatgtcataaaaagtatggaaaagtgtggggcttttatgatggtcaacagcctgtgctggctatcacagatcctgacatgatcaaaacagtgctagtgaaagaatgttattctgtcttcacaaaccggaggccttttggtccagtgggatttatgaaaagtgccatctctatagctgaggatgaagaatggaagagattacgatcattgctgtctccaaccttcaccagtggaaaactcaaggagatggtccctatcattgcccagtatggagatgtgttggtgagaaatctgaggcgggaagcagagacaggcaagcctgtcaccttgaaagacgtctttggggcctacagcatggatgtgatcactagcacatcatttggagtgaacatcgactctctcaacaatccacaagacccctttgtggaaaacaccaagaagcttttaagatttgattttttggatccattctttctctcaataacagtctttccattcctcatcccaattcttgaagtattaaatatctgtgtgtttccaagagaagttacaaattttttaagaaaatctgtaaaaaggatgaaagaaagtcgcctcgaagatacacaaaagcaccgagtggatttccttcagctgatgattgactctcagaattcaaaagaaactgagtcccacaaagctctgtccgatctggagctcgtggcccaatcaattatctttatttttgctggctatgaaaccacgagcagtgttctctccttcattatgtatgaactggccactcaccctgatgtccagcagaaactgcaggaggaaattgatgcagttttacccaataaggcaccacccacctatgatactgtgctacagatggagtatcttgacatggtggtgaatgaaacgctcagattattcccaattgctatgagacttgagagggtctgcaaaaaagatgttgagatcaatgggatgttcattcccaaaggggtggtggtgatgattccaagctatgctcttcaccgtgacccaaagtactggacagagcctgagaagttcctccctgaaagattcagcaagaagaacaaggacaacatagatccttacatatacacaccctttggaagtggacccagaaactgcattggcatgaggtttgctctcatgaacatgaaacttgctctaatcagagtccttcagaacttctccttcaaaccttgtaaagaaacacagatccccctgaaattaagcttaggaggacttcttcaaccagaaaaacccgttgttctaaaggttgagtcaagggatggcaccgtaagtggagcctgaattttcctaaggacttctgctttgctcttcaagaaatctgtgcctgagaacaccagagacctcaaattactttgtgaatagaactctgaaatgaagatgggcttcatccaatggactgcataaataaccggggattctgtacatgcattgagctctctcattgtctgtgtagagtgttatacttgggaatataaaggaggtgaccaaatcagtgtgaggaggtagatttggctcctttgcttctcacgggactatttccaccacccccagttagcaccattaactcctcctgagctctgataagagaatcaacatttctcaataatttcctccacaaattattaatgaaaataagaattattttgatggctctaacaatgacatttatatcacatgttttctctggagtattctataagttttatgttaaatcaataaagaccactttacaaaagta

SEQ ID NO: 1063 - DNA, 1821 bp; single-stranded, linear
  immediate source library: GENBANK
  immediate source clone: g181375
gggcgctgaagtggagcaggtacagtcacagctgtggggacagcatgctggccaagggtcttcccccacgctcagtcctggtcaaaggctaccagacctttctgagtgcccccagggaggggctggggcgtctcagggtgcccactggcgagggagctggcatctccacccgcagtcctcgccccttcaatgagatcccctctcctggtgacaatggctggctaaacctgtaccatttctggagggagacgggcacacacaaagtccaccttcaccatgtccagaatttccagaagtatggcccgatttacagggagaagctcggcaacgtggagtcggtttatgtcatcgaccctgaagatgtggcccttctctttaagtccgagggccccaacccagaacgattcctcatcccgccctgggtcgcctatcaccagtattaccagagacccataggagtcctgttgaagaagtcggcagcctggaagaaagaccgggtggccctgaaccaggaggtgatggctccagaggccaccaagaactttttgcccctgttggatgcagtgtctcgggacttcgtcagtgtcctgcacaggcgcatcaagaaggcgggctccggaaattactcgggggacatcagtgatgacctgttccgctttgcctttgagtccatcactaacgtcatttttggggagcgccaggggatgctggaggaagtagtgaaccccgaggcccagcgattcattgatgccatctaccagatgttccacaccagcgtccccatgctcaaccttcccccagacctgttccgtctgttcaggaccaagacctggaaggaccatgtggctgcatgggacgtgattttcagtaaagctgacatatacacccagaacttctactgggaattgagacagaaaggaagtgttcaccacgattaccgtggcatgctctacagactcctgggagacagcaagatgtccttcgaggacatcaaggccaacgtcacagagatgctggcaggaggggtggacacgacgtccatgaccctgcagtggcacttgtatgagatggcacgcaacctgaaggtgcaggatatgctgcgggcagaggtcttggctgcgcggcaccaggcccagggagacatggccacgatgctacagctggtccccctcctcaaagccagcatcaaggagacactaagacttcaccccatctccgtgaccctgcagagatatcttgtaaatgacttggttcttcgagattacatgattcctgccaagacactggtgcaagtggccatctatgctctgggccgagagcccaccttcttcttcgacccggaaaattttgacccaacccgatggctgagcaaagacaagaacatcacctacttccggaacttgggctttggctggggtgtgcggcagtgtctgggacggcggatcgctgagctagagatgaccatcttcctcatcaatatgctggagaacttcagagttgaaatccaacacctcagcgatgtgggcaccacattcaacctcattctgatgcctgaaaagcccatctccttcaccttctggccctttaaccaggaagcaacccagcagtgatcagagaggatggcctgcagccacatgggaggaaggcccaggggtggggcccatggggtctctgcatcttcagtcgtctgtcccaagtcctgctcctttctgcccagcctgctcagcaggttgaatgggttctcagtggtcaccttcctcagctcagctgggccactcctcttcacccaccccatggagacaataaacagctgaaccatcg

SEQ ID NO: 1064 - DNA, 2220 bp; single-stranded, linear
  immediate source library: GENBANK
  immediate source clone: g181464
ccgctgggcgtagctgcgactcggcggagtcccggcggcgcgtccttgttctaacccggcgcgccatgaccgtcgcgcggccgagcgtgcccgcggcgctgcccctcctcggggagctgccccggctgctgctgctggtgctgttgtgcctgccggccgtgtggggtgactgtggccttcccccagatgtacctaatgcccagccagctttggaaggccgtacaagttttcccgaggatactgtaataacgtacaaatgtgaagaaagctttgtgaaaattcctggcgagaaggactcagtgatctgccttaagggcagtcaatggtcagatattgaagagttctgcaatcgtagctgcgaggtgccaacaaggctaaattctgcatccctcaaacagccttatatcactcagaattattttccagtcggtactgttgtggaatatgagtgccgtccaggttacagaagagaaccttctctatcaccaaaactaacttgccttcagaatttaaaatggtccacagcagtcgaattttgtaaaaagaaatcatgccctaatccgggagaaatacgaaatggtcagattgatgtaccaggtggcatattatttggtgcaaccatctccttctcatgtaacacagggtacaaattatttggctcgacttctagtttttgtcttatttcaggcagctctgtccagtggagtgacccgttgccagagtgcagagaaatttattgtccagcaccaccacaaattgacaatggaataattcaaggggaacgtgaccattatggatatagacagtctgtaacgtatgcatgtaataaaggattcaccatgattggagagcactctatttattgtactgtgaataatgatgaaggagagtggagtggcccaccacctgaatgcagaggaaaatctctaacttccaaggtcccaccaacagttcagaaacctaccacagtaaatgttccaactacagaagtctcaccaacttctcagaaaaccaccacaaaaaccaccacaccaaatgctcaagcaacacggagtacacctgtttccaggacaaccaagcattttcatgaaacaaccccaaataaaggaagtggaaccacttcaggtactacccgtcttctatctggttctcgtcctgtcacccaggctggtatgcggtggtgtgatcgtagctcactgcagtctcgaactcctgggttcaagcgatccttccacttcagcctcccaagtagctggtactacagggcacacgtgtttcacgttgacaggtttgcttgggacgctagtaaccatgggcttgctgacttagccaaagaagagttaagaagaaaatacacacaagtatacagactgttcctagtttcttagacttatctgcatattggataaaataaatgcaattgtgctcttcatttaggatgctttcattgtctttaagatgtgttaggaatgtcaacagagcaaggagaaaaaaggcagtcctggaatcacattcttagcacacctacacctcttgaaaatagaacaacttgcagaattgagagtgattcctttcctaaaagtgtaagaaagcatagagatttgttcgtatttagaatgggatcacgaggaaaagagaaggaaagtgatttttttccacaagatctgtaatgttatttccacttataaaggaaataaaaaatgaaaaacattatttggatatcaaaagcaaataaaaacccaattcagtctcttctaagcaaaattgctaaagagagatgaaccacattataaagtaatctttggctgtaaggcattttcatctttccttcgggttggcaaaatattttaaaggtaaaacatgctggtgaaccaggggtgttgatggtgataagggaggaatatagaatgaaagactgaatcttcctttgttgcacaaatagagtttggaaaaagcctgtgaaaggtgtcttctttgacttaatgtctttaaaagtatccagagatactacaatattaacataagaaaagattatatattatttctgaatcgagatgtccatagtcaaatttgtaaatcttattcttttgtaatatttatttatatttatttatgacagtgaacattctgattttacatgtaaaacaagaaaagttgaagaagatatgtgaagaaaaatgtatttttcctaaatagaaataaatgatcccattttttggt

SEQ ID NO: 1065 - DNA, 2941 bp; single-stranded, linear
  immediate source library: GENBANK
  immediate source clone: g181905
acgcgccgcgtgcccggccgcgcccagcagggtttccaggcctgaggtgcccgccctggccccaggagaatgaaccagccgcagaggatggcgcctgtgggcacagacaaggagctcagtgacctcctggacttcagcatgatgttcccgctgcctgtcaccaacgggaagggccggcccgcctccctggccggggcgcagttcggaggttcaggtcttgaggaccggcccagctcaggctcctggggcagcggcgaccagagcagctcctcctttgaccccagccggaccttcagcgagggcacccacttcactgagtcgcacagcagcctctcttcatccacattcctgggaccgggactcggaggcaagagcggtgagcggggcgcctatgcctccttcgggagagacgcaggcgtgggcggcctgactcaggctggcttcctgtcaggcgagctggccctcaacagccccgggcccctgtccccttcgggcatgaaggggacctcccagtactacccctcctactccggcagctcccggcggagagcggcagacggcagcctagacacgcagcccaagaaggtccggaaggtcccgccgggtcttccatcctcggtgtacccacccagctcaggtgaggactacggcagggatgccaccgcctacccgtccgccaagacccccagcagcacctatcccgcccccttctacgtggcagatggcagcctgcacccctcagccgagctctggagtcccccgggccaggcgggcttcgggcccatgctgggtgggggctcatccccgctgcccctcccgcccggtagcggcccggtgggcagcagtggaagcagcagcacgtttggtggcctgcaccagcacgagcgtatgggctaccagctgcatggagcagaggtgaacggtgggctcccatctgcatcctccttctcctcagcccccggagccacgtacggcggcgtctccagccacacgccgcctgtcagcggggccgacagcctcctgggctcccgagggaccacagctggcagctccggggatgccctcggcaaagcactggcctcgatctactccccggatcactcaagcaataacttctcgtccagcccttctacccccgtgggctccccccagggcctggcaggaacgtcacagtggcctcgagcaggagcccccggtgccttatcgcccagctacgacgggggtctccacggcctgcagagtaagatagaagaccacctggacgaggccatccacgtgctccgcagccacgccgtgggcacagccggcgacatgcacacgctgctgcctggccacggggcgctggcctcaggtttcaccggccccatgtcactgggcgggcggcacgcaggcctggttggaggcagccaccccgaggacggcctcgcaggcagcaccagcctcatgcacaaccacgcggccctccccagccagccaggcaccctccctgacctgtctcggcctcccgactcctacagtgggctagggcgagcaggtgccacggcggccgccagcgagatcaagcgggaggagaaggaggacgaggagaacacgtcagcggctgaccactcggaggaggagaagaaggagctgaaggccccccgggcccggaccagcccagacgaggacgaggacgaccttctccccccagagcagaaggccgagcgggagaaggagcgccgggtggccaataacgcccgggagcggctgcgggtccgtgacatcaacgaggcctttaaggagctggggcgcatgtgccaactgcacctcaacagcgagaagccccagaccaaactgctcatcctgcaccaggctgtctcggtcatcctgaacttggagcagcaagtgcgagagcggaacctgaatcccaaagcagcctgtttgaaacggcgagaagaggaaaaggtgtcaggtgtggttggagacccccagatggtgctttcagctccccacccaggcctgagcgaagcccacaaccccgccgggcacatgtgaaaggtatgcctccgtgggacgagccaccccgtttcagccctgtgctctggccccagaacggccactcgagaccccgggattcatccacatccacacctcacacacctgttgtcagcatcgagccaacaccaacctgacaaggttcggagtgatgggggcggccaaggtgacactgggtccaggagctccctgggccctggcctaccactcactggcctcgctccccctgtccccgaatctcagccaccgttgcactctgtgacctgtcccatggatccactatcttggccctgttgcctgggctgacaggagtttttttccagtaaacaaaacctgaaagcaagcaacaaaacatacactttgtcagagaagaaaaaatgccttaactataaaaagcggagaaatggaaacatatcactcaagggggatgctgtggaaacctggcttattcttctaaagccaccagcaaattgtgcctaagcgaaatattttttttaaggaaaataaaaacattagttacaagattttttttcttaatgtgagatgaaaattagcaaggatgctgcctttggtctctggtttttttaagctttttttgcatatgttttgtaagcaacaaatttttttgtataaaagtcccgtgtctctcgctatttctgctgctgttcctagactgagcattgcatttcttgatcaaccagatgattaaacgttgtattaaaaaaaaaaaggagaaggagcgccgggtggccaataacgcccgggagcggctgcgggtccgtgacatcaacgaggccttaaggagctggggcgcatgtgccaactgcacctcaacagcgagaagccccagaccaaactgctcatcctgcaccaggctgtctcggtcatcctgaacttggagcagcaa

SEQ ID NO: 1066 - DNA, 3934 bp; single-stranded, linear
  immediate source library: GENBANK
  immediate source clone: g181939
gccctcccagagctgccggacgctcgcgggtctcggaacgcatcccgccgcgggggcttcggccgtggcatgggcgccgcgggcctgctcggggttttcttggctctcgtcgcaccgggggtcctcgggatttcttgtggctctcctccgcctatcctaaatggccggattagttattattctacccccattgctgttggtaccgtgataaggtacagttgttcaggtaccttccgcctcattggagaaaaaagtctattatgcataactaaagacaaagtggatggaacctgggataaacctgctcctaaatgtgaatatttcaataaatattcttcttgccctgagcccatagtaccaggaggatacaaaattagaggctctacaccctacagacatggtgattctgtgacatttgcctgtaaaaccaacttctccatgaacggaaacaagtctgtttggtgtcaagcaaataatatgtgggggccgacacgactaccaacctgtgtaagtgttttccctctcgagtgtccagcacttcctatgatccacaatggacatcacacaagtgagaatgttggctccattgctccaggattgtctgtgacttacagctgtgaatctggttacttgcttgttggagaaaagatcattaactgtttgtcttcgggaaaatggagtgctgtcccccccacatgtgaagaggcacgctgtaaatctctaggacgatttcccaatgggaaggtaaaggagcctccaattctccgggttggtgtaactgcaaactttttctgtgatgaagggtatcgactgcaaggcccaccttctagtcggtgtgtaattgctggacagggagttgcttggaccaaaatgccagtatgtgaagaaattttttgcccatcacctccccctattctcaatggaagacatataggcaactcactagcaaatgtctcatatggaagcatagtcacttacacttgtgacccggacccagaggaaggagtgaacttcatccttattggagagagcactctccgttgtacagttgatagtcagaagactgggacctggagtggccctgccccacgctgtgaactttctacttctgcggttcagtgtccacatccccagatcctaagaggccgaatggtatctgggcagaaagatcgatatacctataacgacactgtgatatttgcttgcatgtttggcttcaccttgaagggcagcaagcaaatccgatgcaatgcccaaggcacatgggagccatctgcaccagtctgtgaaaaggaatgccaggcccctcctaacatcctcaatgggcaaaaggaagatagacacatggtccgctttgaccctggaacatctataaaatatagctgtaaccctggctatgtgctggtgggagaagaatccatacagtgtacctctgagggggtgtggacaccccctgtaccccaatgcaaagtggcagcgtgtgaagctacaggaaggcaactcttgacaaaaccccagcaccaatttgttagaccagatgtcaactcttcttgtggtgaagggtacaagttaagtgggagtgtttatcaggagtgtcaaggcacaattccttggtttatggagattcgtctttgtaaagaaatcacctgcccaccaccccctgttatctacaatggggcacacaccgggagttccttagaagattttccatatggaaccacggtcacttacacatgtaaccctgggccagaaagaggagtggaattcagcctcattggagagagcaccatccgttgtacaagcaatgatcaagaaagaggcacctggagtggccctgctcccctatgtaaactttccctccttgctgtccagtgctcacatgtccatattgcaaatggatacaagatatctggcaaggaagccccatatttctacaatgacactgtgacattcaagtgttatagtggatttactttgaagggcagtagtcagattcgttgcaaagctgataacacctgggatcctgaaataccagtttgtgaaaaagaaacatgccagcatgtgagacagagtcttcaagaacttccagctggttcacgtgtggagctagttaatacgtcctgccaagatgggtaccagttgactggacatgcttatcagatgtgtcaagatgctgaaaatggaatttggttcaaaaagattccactttgtaaagttattcactgtcaccctccaccagtgattgtcaatgggaagcacacagggatgatggcagaaaactttctatatggaaatgaagtctcttatgaatgtgaccaaggattctatctcctgggagagaaaaaattgcagtgcagaagtgattctaaaggacatggatcttggagcgggccttccccacagtgcttacgatctcctcctgtgactcgctgccctaatccagaagtcaaacatgggtacaagctcaataaaacacattctgcatattcccacaatgacatagtgtatgttgactgcaatcctggcttcatcatgaatggtagtcgcgtgattaggtgtcatactgataacacatgggtgccaggtgtgccaacttgtatgaaaaaagccttcatagggtgtccacctccgcctaagacccctaacgggaaccatactggtggaaacatagctcgattttctcctggaatgtcaatcctgtacagctgtgaccaaggctacctgctggtgggagaggcactccttctttgcacacatgagggaacctggagccaacctgcccctcattgtaaagaggtaaactgtagctcaccagcagatatggatggaatccagaaagggctggaaccaaggaaaatgtatcagtatggagctgttgtaactctggagtgtgaagatgggtatatgctggaaggcagtccccagagccagtgccaatcggatcaccaatggaaccctcccctggcggtttgcagatcccgttcacttgctcctgtcctttgtggtattgctgcaggtttgatacttcttaccttcttgattgtcattaccttatacgtgatatcaaaacacagagaacgcaattattatacagatacaagccagaaagaagcttttcatttagaagcacgagaagtatattctgttgatccatacaacccagccagctgatcagaagacaaactggtgtgtgcctcattgcttggaattcagcggaatattgattagaaagaaactgctctaatatcagcaagtctctttatatggcctcaagatcaatgaaatgatgtcataagcgatcacttcctatatgcacttattctcaagaagaacatctttatggtaaagatgggagcccagtttcactgccatatactcttcaaggactttctgaagcctcacttatgagatgcctgaagccaggccatggctataaacaattacatggctctaaaaagttttgccctttttaaggaaggcactaaaaagagctgtcctggtatctagacccatcttctttttgaaatcagcatactcaatgttactatctgcttttggttataatgtgtttttaattatctaaagtatgaagcattttctggggttatgatggccttacctttattaggaagtatggttttattttgatagtagcttcctcctctggtggtgttaatcatttcatttttacccttactgtttgagtttctctcacattactgtatatactttgcctttccataatcactcagtgattgcaatttgcacaagtttttttaaattatgggaatcaagatttaatcctagagatttggtgtacaattcaggctttggatgtttctttagcagttttgtgataagttctagttgcttgtaaaatttcacttaataatgtgtacattagtcattcaataaattgtaattgtaaagaaaa

SEQ ID NO: 1067 - DNA, 694 bp; single-stranded, linear
  immediate source library: GENBANK
  immediate source clone: g181954
cacaggagctacagcgcggagactggaaacatggttccaaaactgttcacttcccaaatttgtctgcttcttctgttggggcttctggctgtggagggctcactccatgtcaaacctccacagtttacctgggctcaatggtttgaaacccagcacatcaatatgacctcccagcaatgcaccaatgcaatgcaggtcattaacaattatcaacggcgatgcaaaaaccaaaatactttccttcttacaacttttgctaacgtagttaatgtttgtggtaacccaaatatgacctgtcctagtaacaaaactcgcaaaaattgtcaccacagtggaagccaggtgcctttaatccactgtaacctcacaactccaagtccacagaatatttcaaactgcaggtatgcgcagacaccagcaaacatgttctatatagttgcatgtgacaacagagatcaacgacgagaccctccacagtatccggtggttccagttcacctggatagaatcatctaagctcctgtatcagcactcctcatcatcactcatctgccaagctcctcaatcatagccaagatcccatctctccatatactttgggtatcagcatctgtcctcatcagtctccataccccttcagctttcctgagctgaagtgccttgtgaaccctgcaataaactgctttgcaaattc

SEQ ID NO: 1068 - DNA, 1229 bp; single-stranded, linear
  immediate source library: GENBANK
  immediate source clone: g181966
gcatgccttctggcttacacactgggtgtgaaacaactaattgtcggtgttaacaaaatggattccactgagccaccctacagccagaagagatatgaggaaattgttaaggaagtcagcacttacattaagaaaattggctacaaccccgacacagtagcatttgtgccaatttctggttggaatggtgacaacatgctggagccaagtgctaacatgccttggttcaagggatggaaagtcacccgtaaggatggcaatgccagtggaaccacgctgcttgaggctctggactgcatcctaccaccaactcgtccaactgacaagcccttgcgcctgcctctccaggatgtctacaaaattggtggtattggtactgttcctgttggccgagtggagactggtgttctcaaacccggtatggtggtcacctttgctccagtcaacgttacaacggaagtaaaatctgtcgaaatgcaccatgaagctttgagtgaagctcttcctggggacaatgtgggcttcaatgtcaagaatgtgtctgtcaaggatgttcgtcgtggcaacgttgctggtgacagcaaaaatgacccaccaatggaagcagctggcttcactgctcaggtgattatcctgaaccatccaggccaaataagcgccggctatgcccctgtattggattgccacacggctcacattgcatgcaagtttgctgagctgaaggaaaagattgatcgccgttctggtaaaaagctggaagatggccctaaattcttgaagtctggtgatgctgccattgttgatatggttcctggcaagcccatgtgtgttgagagcttctcagactatccacctttgggtcgctttgctgttcgtgatatgagacagacagttgcggtgggtgtcatcaaagcagtggacaagaaggctgctggagctggcaaggtcaccaagtctgcccagaaagctcagaaggctaaatgaatattatccctaatacctgccacccaactcttaatcagtggtggaagaacggtctcagaactgtttgtttcaattggccatttaagtttagtagtaaaagactggttaatgataacaatgcatcgtaaaaccttcagaaggaaaggagaatgttttgtggaccaccttggttttcttttttgcgtgtggcagttttaagttattagtttttaaaatcagtactttttaatggaaacaacttgacc

SEQ ID NO: 1069 - DNA, 2700 bp; single-stranded, linear
  immediate source library: GENBANK
  immediate source clone: g181986
tctgacactccaggtagcgagggagttgggtctccaggttgtgcgaggagcaaatgatgaccgccaaggccgtagacaaaatcccagtaactctcagtggttttgtgcaccagctgtctgacaacatctacccggtggaggacctcgccgccacgtcggtgaccatctttcccaatgccgaactgggaggcccctttgaccagatgaacggagtggccggagatggcatgatcaacattgacatgactggagagaagaggtcgttggatctcccatatcccagcagctttgctcccgtctctgcacctagaaaccagaccttcacttacatgggcaagttctccattgacccacagtaccctggtgccagctgctacccagaaggcataatcaatattgtgagtgcaggcatcttgcaaggggtcacttccccagcttcaaccacagcctcatccagcgtcacctctgcctcccccaacccactggccacaggacccctgggtgtgtgcaccatgtcccagacccagcctgacctggaccacctgtactctccgccaccgcctcctcctccttattctggctgtgcaggagacctctaccaggacccttctgcgttcctgtcagcagccaccacctccacctcttcctctctggcctacccaccacctccttcctatccatcccccaagccagccacggacccaggtctcttcccaatgatcccagactatcctggattctttccatctcagtgccagagagacctacatggtacagctggcccagaccgtaagccctttccctgcccactggacaccctgcgggtgccccctccactcactccactctctacaatccgtaactttaccctggggggccccagtgctgggatgaccggaccaggggccagtggaggcagcgagggaccccggctgcctggtagcagctcagcagcagcagcagccgccgccgccgccgcctataacccacaccacctgccactgcggcccattctgaggcctcgcaagtaccccaacagacccagcaagacgccggtgcacgagaggccctacccgtgcccagcagaaggctgcgaccggcggttctcccgctctgacgagctgacacggcacatccgaatccacactgggcataagcccttccagtgtcggatctgcatgcgcaacttcagccgcagtgaccacctcaccacccatatccgcacccacaccggtgagaagcccttcgcctgtgactactgtggccgaaagtttgcccggagtgatgagaggaagcgccacaccaagatccacctgagacagaaagagcggaaaagcagtgccccctctgcatcggtgccagccccctctacagcctcctgctctgggggcgtgcaggcctgggggtaccctgtgcagcagtaacagcagcagtcttggcggagggccgctcgccccttgctcctctcggacccggacaccttgagatgagactcaggctgatacaccagctcccaaaggtcccggaggccctttgtccactggagctgcacaacaaacactaccaccctttcctgtccctctctccctttgttgggcaaagggctttggtggagctagcactgccccctttccacctagaagcaggttcttcctaaaacttagcccattctagtctctcttaggtgagttgactatcaacccaaggcaaaggggaggctcagaaggaggtggtgtggggatcccctggccaagagggctgaggtctgaccctgctttaaagggttgtttgactaggttttgctaccccacttccccttattttgacccatcacaggtttttgaccctggatgtcagagttgatctaagacgttttctacaataggttgggagatgctgatcccttcaagtggggacagcaaaaagacaagcaaaactgatgtgcactttatggcttgggactgatttgggggacattgtacagtgagtgaagtatagcctttatgccacactctgtggccctaaaatggtgaatcagagcatatctagttgtctcaacccttgaagcaatatgtattatatactcagagaacagaagtgcaatgtgatgggaggaacgtagcaatatctgctccttttcgagttgtttgagaaatgtaggctattttttcagtgtatatccactcagattttgtgtatttttgatgtacccacactgttctctaaattctgaatctttgggaaaaaatgtaaagcatttatgatctcagaggttaacttatttaagggggatgtacatattctctgaaactaggatgcatgcaattgtgttggaagtgtccttggtcgccttgtgtgatgtagacaaatgttacaaggctgcatgtaaatgggttgccttattatggagaaaaaaatcactccctgagtttagtatggctgtatatttatgcctattaatatttggaattttttttagaaagtatatttttgtatgctttgttttgtgacttaaaagtgttacctttgtagtcaaatttcagataagaatgtacataatgttaccggagctgatttgtttggtcattagctcttaatagttgtgaaaaaataaatctattctaacgcaaaaccactaactgaagttcagatataatggatggtttgtgactatagtgtaaataaatacttttcaacaat

SEQ ID NO: 1070 - DNA, 2159 bp; single-stranded, linear
  immediate source library: GENBANK
  immediate source clone: g182068
cgctcctccacgcctgcggacgcgtggcgagcggaggcagcgctgcctgttcgcgccatgggggcaccgtggggctcgccgacggcggcggcgggcgggcggcgcgggtggcgccgaggccgggggctgccatggaccgtctgtgtgctggcggccgccggcttgacgtgtacggcgctgatcacctacgcttgctgggggcagctgccgccgctgccctgggcgtcgccaaccccgtcgcgaccggtgggcgtgctgctgtggtgggagcccttcggggggcgcgatagcgccccgaggccgccccctgactgccggctgcgcttcaacatcagcggctgccgcctgctcaccgaccgcgcgtcctacggagaggctcaggccgtgcttttccaccaccgcgacctcgtgaaggggccccccgactggcccccgccctggggcatccaggcgcacactgccgaggaggtggatctgcgcgtgttggactacgaggaggcagcggcggcggcagaagccctggcgacctccagccccaggcccccgggccagcgctgggtttggatgaacttcgagtcgccctcgcactccccggggctgcgaagcctggcaagtaacctcttcaactggacgctctcctaccgggcggactcggacgtctttgtgccttatggctacctctaccccagaagccaccccggcgacccgccctcaggcctggccccgccactgtccaggaaacaggggctggtggcatgggtggtgagccactgggacgagcgccaggcccgggtccgctactaccaccaactgagccaacatgtgaccgtggacgtgttcggccggggcgggccggggcagccggtgcccgaaattgggctcctgcacacagtggcccgctacaagttctacctggctttcgagaactcgcagcacctggattatatcaccgagaagctctggcgcaacgcgttgctcgctggggcggtgccggtggtgctgggcccagaccgtgccaactacgagcgctttgtgccccgcggcgccttcatccacgtggacgacttcccaagtgcctcctccctggcctcgtacctgcttttcctcgaccgcaaccccgcggtctatcgccgctacttccactggcgccggagctacgctgtccacatcacctccttctgggacgagccttggtgccgggtgtgccaggctgtacagagggctggggaccggcccaagagcatacggaacttggccagctggttcgagcggtgaagccgcgctcccctggaagcgacccaggggaggccaagttgtcagctttttgatcctctactgtgcatctccttgactgccgcatcatgggagtaagttcttcaaacacccatttttgctctatgggaaaaaaacgatttaccaattaatattactcagcacagagatgggggcccggtttccatattttttgcacagctagcaattgggctccctttgctgctgatgggcatcattgtttaggggtgaaggagggggttcttcctcaccttgtaaccagtgcagaaatgaaatagcttagcggcaagaagccgttgaggcggtttcctgaatttccccatctgccacaggccatatttgtggcccgtgcagcttccaaatctcatacacaactgttcccgattcacgtttttctggaccaaggtgaagcaaatttgtggttgtagaaggagccttgttggtggagagtggaaggactgtggctgcaggtgggactttgttgtttggattcctcacagccttggctcctgagaaaggtgaggagggcagtccaagaggggccgctgacttctttcacaagtactatctgttcccctgtcctgtgaatggaagcaaagtgctggattgtccttggaggaaacttaagatgaatacatgcgtgtacctcactttacataagaaatgtattcctgaaaagctgcatttaaatcaagtcccaaattcattgacttaggggagttcagtatttaatgaaaccctatggagaatttatccctttacaatgtgaatagtcatctcctaatttgtttcttctgtctttatgtttttctataacctggattttttaaatcatattaaaattacagatgtgaaaataaaaaaaa

SEQ ID NO: 1071 - DNA, 483 bp; single-stranded, linear
  immediate source library: GENBANK
  immediate source clone: g182131
accaacccggtcccagccatgtccaacgtcccccacaagtcctcgctgcccgagggcatccgccctggcacggtgctgagaattcgcggcttggttcctcccaatgccagcaggttccatgtaaacctgctgtgcggggaggagcagggctccgatgccgccctgcatttcaacccccggctggacacgtcggaggtggtcttcaacagcaaggagcaaggctcctggggccgcgaggagcgcgggccgggcgttcctttccagcgcgggcagcccttcgaggtgctcatcatcgcgtcagacgacggcttcaaggccgtggttggggacgcccagtaccaccacttccgccaccgcctgccgctggcgcgcgtgcgcctggtggaggtgggcggggacgtgcagctggactccgtgaggatcttctgagcagaagcccaggcgggcccggggccttggctggcaaataaagcgttagcccgc

SEQ ID NO: 1072 - DNA, 3110 bp; single-stranded, linear
  immediate source library: GENBANK
  immediate source clone: g182262
gccgccgccgccatccgccgccgcagccagcttccgccgccgcaggaccggcccctgccccagcctccgcagccgcggcgcgtccacgcccgcccgcgcccagggcgagtcggggtcgccgcctgcacgcttctcagtgttccccgcgccccgcatgtaacccggccaggcccccgcaactgtgtcccctgcagctccagccccgggctgcacccccccgccccgacaccagctctccagcctgctcgtccaggatggccgcggccaaggccgagatgcagctgatgtccccgctgcagatctctgacccgttcggatcctttcctcactcgcccaccatggacaactaccctaagctggaggagatgatgctgctgagcaacggggctccccagttcctcggcgccgccggggccccagagggcagcggcagcaacagcagcagcagcagcagcgggggcggtggaggcggcgggggcggcagcaacagcagcagcagcagcagcaccttcaaccctcaggcggacacgggcgagcagccctacgagcacctgaccgcagagtcttttcctgacatctctctgaacaacgagaaggtgctggtggagaccagttaccccagccaaaccactcgactgccccccatcacctatactggccgcttttccctggagcctgcacccaacagtggcaacaccttgtggcccgagcccctcttcagcttggtcagtggcctagtgagcatgaccaacccaccggcctcctcgtcctcagcaccatctccagcggcctcctccgcctccgcctcccagagcccacccctgagctgcgcagtgccatccaacgacagcagtcccatttactcagcggcacccaccttccccacgccgaacactgacattttccctgagccacaaagccaggccttcccgggctcggcagggacagcgctccagtacccgcctcctgcctaccctgccgccaagggtggcttccaggttcccatgatccccgactacctgtttccacagcagcagggggatctgggcctgggcaccccagaccagaagcccttccagggcctggagagccgcacccagcagccttcgctaacccctctgtctactattaaggcctttgccactcagtcgggctcccaggacctgaaggccctcaataccagctaccagtcccagctcatcaaacccagccgcatgcgcaagtaccccaaccggcccagcaagacgcccccccacgaacgcccttacgcttgcccagtggagtcctgtgatcgccgcttctcccgctccgacgagctcacccgccacatccgcatccacacaggccagaagcccttccagtgccgcatctgcatgcgcaacttcagccgcagcgaccacctcaccacccacatccgcacccacacaggcgaaaagcccttcgcctgcgacatctgtggaagaaagtttgccaggagcgatgaacgcaagaggcataccaagatccacttgcggcagaaggacaagaaagcagacaaaagtgttgtggcctcttcggccacctcctctctctcttcctacccgtccccggttgctacctcttacccgtccccggttactacctcttatccatccccggccaccacctcatacccatcccctgtgcccacctccttctcctctcccggctcctcgacctacccatcccctgtgcacagtggcttcccctccccgtcggtggccaccacgtactcctctgttccccctgctttcccggcccaggtcagcagcttcccttcctcagctgtcaccaactccttcagcgcctccacagggctttcggacatgacagcaaccttttctcccaggacaattgaaatttgctaaagggaaaggggaaagaaagggaaaagggagaaaaagaaacacaagagacttaaaggacaggaggaggagatggccataggagaggagggttcctcttaggtcagatggaggttctcagagccaagtcctccctctctactggagtggaaggtctattggccaacaatcctttctgcccacttccccttccccaattactattccctttgacttcagctgcctgaaacagccatgtccaagttcttcacctctatccaaagaacttgatttgcatggattttggataaatcatttcagtatcatctccatcatatgcctgaccccttgctcccttcaatgctagaaaatcgagttggcaaaatggggtttgggcccctcagagccctgccctgcacccttgtacagtgtctgtgccatggatttcgtttttcttggggtactcttgatgtgaagataatttgcatattctattgtattatttggagttaggtcctcacttgggggaaaaaaaaaaaaaagaaaagccaagcaaaccaatggtgatcctctattttgtgatgatgctgtgacaataagtttgaacccttttttttgaaacagcagtcccagtattctcagagcatgtgtcagagtgttgttccgttaacctttttgtaaatactgcttgaccgtactctcacatgtggcaaaatatggtttggtttttctttttttttttttttgaaagtgttttttcttcgtccttttggtttaaaaagtttcacgtcttggtgccttttgtgtgatgcgccttgctgatggcttgacatgtgcaattgtgagggacatgctcacctctagccttaaggggggcagggagtgatgatttgggggaggctttgggagcaaaataaggaagagggctgagctgagcttcggttctccagaatgtaagaaaacaaaatctaaaacaaaatctgaactctcaaaagtctatttttttaactgaaaatgtaaatttataaatatattcaggagttggaatgttgtagttacctactgagtaggcggcgatttttgtatgttatgaacatgcagttcattattttgtggttctattttactttgtacttgtgtttgcttaaacaaagtgactgtttggcttataaacacattgaatgcgctttattgcccatgggatatgtggtgtatatccttccaaaaaattaaaacgaaaataaagta

SEQ ID NO: 1073 - DNA, 2158 bp; single-stranded, linear
  immediate source library: GENBANK
  immediate source clone: g182282
aatataatgaaaagtcaaagttttaactagacaccaatgacgcctaactgtctttctctttcattataaacccgctatagataacgaggaaatattctgaaatggatcccaaatatttcatcttaattttgttttgtggacacctgaacaatacatttttttcaaagacagagacaattacaacagagaagcagtcacagcctaccttatacacatcatcaatgtcacaggtattggctaattctcaaaacacaacagggaatcctttgggtcaaccaacacaattcagcgacactttttctggacaatcaatatcacctgccaaagtcactgctggacaaccaacaccagctgtctatacctcttctgaaaaaccagaagcacatacttctgctggacaaccacttgcctacaacaccaaacaaccaacaccaatagccaacacctcctcccagcaagccgtgttcacctctgccagacaactaccatctgcccgtacttctaccacacaaccaccaaagtcatttgtctatacttttactcaacaatcatcatctgtccagatcccttctagaaaacaaataactgttcataatccatccacacaaccaacatcaactgtcaaaaattcacctaggagtacaccaggatttatcttagatactaccagtaacaaacaaaccccacaaaaaaacaattataattcaatagctgccatactaattggtgtacttctgacttctatgttggtagctataatcatcattgtactttggaaatgcttaaggaaaccagttttaaatgatcaaaattgggcaggtagatctccatttgctgatggagaaacccctgacatttgtatggataacatcagagaaaatgaaatatccacaaaacgtacatcaatcatttcacttacaccctggaaaccaagcaaaagcacacttttagcagatgacttagaaattaagttgtttgaatcaagtgaaaacattgaagactccaacaaccccaaaacagagaaaataaaagatcaagtaaatggtacatcagaagatagtgctgatggttcaacagttggaactgctgtttcttcttcagatgatgcagatctgcctccaccacctccccttctggatttggaaggacaggaaagtaaccaatctgacaaacccacaatgacaattgtatctcctcttccaaatgattctactagtctccctccatctctggactgtctcaatcaagactgtggagatcataaatctgagataatacaatcatttccaccgcttgactcacttaacttgcccctgccaccagtagattttatgaaaaaccaagaagattccaaccttgagatccagtgtcaggagttctctattcctcccaactctgatcaagatcttaatgaatccctgccacctccacctgcagaactgttataaatattacaacttgctttttagctgatcttccatcctcaaatgactcttttttctttatatgttaacatatataaaatggcaactgatagtcaattttgatttttattcaggaactatctgaaatctgctcagagcctatgtgcatagatgaaacttttttttaaaaaaagttatttaacagtaatctatttactaattatagtacctatctttaaagtatagtacattttacatatgtaaatggtatgtttcaataatttaagaactctgaaacaatctacatatacttattacccagtacagttttttttcccctgaaaagctgtgtataaaattatggtgaataaacttttatgtttccatttcaaagaccagggtggagaggaataagagactaagtatatgcttcaagttttaaattaatacctcaagtattaaataaatattccaagtttgtgggaatgggagattaaaatgcatgtttgagaatagagaaattttcttcttggtttcattgcaaagagtaaaacaaacatgttaaaacatcaactgaagggttgggttaggaacatttaccctgaaaaaaatatgaggatgcatcataaaatgtaaatattttcctaccatgttgggggggcacaaattttaaaactggcatctttacaagtttcttctttataaacacccaaacaaaatcaagttttataaag

SEQ ID NO: 1074 - DNA, 2534 bp; single-stranded, linear
  immediate source library: GENBANK
  immediate source clone: g182409
gacgcttctggggagtgagggaagcggtttacgagtgacttggctggagcctcaggggcgggcactggcacggaacacaccctgaggccagccctggctgcccaggcggagctgcctcttctcccgcgggttggtggacccgctcagtacggagttggggaagctctttcacttcggaggattgctcaacaaccatgctgggcatctggaccctcctacctctggttcttacgtctgttgctagattatcgtccaaaagtgttaatgcccaagtgactgacatcaactccaagggattggaattgaggaagactgttactacagttgagactcagaacttggaaggcctgcatcatgatggccaattctgccataagccctgtcctccaggtgaaaggaaagctagggactgcacagtcaatggggatgaaccagactgcgtgccctgccaagaagggaaggagtacacagacaaagcccatttttcttccaaatgcagaagatgtagattgtgtgatgaaggacatggcttagaagtggaaataaactgcacccggacccagaataccaagtgcagatgtaaaccaaactttttttgtaactctactgtatgtgaacactgtgacccttgcaccaaatgtgaacatggaatcatcaaggaatgcacactcaccagcaacaccaagtgcaaagaggaaggatccagatctaacttggggtggctttgtcttcttcttttgccaattccactaattgtttgggtgaagagaaaggaagtacagaaaacatgcagaaagcacagaaaggaaaaccaaggttctcatgaatctccaaccttaaatcctgaaacagtggcaataaatttatctgatgttgacttgagtaaatatatcaccactattgctggagtcatgacactaagtcaagttaaaggctttgttcgaaagaatggtgtcaatgaagccaaaatagatgagatcaagaatgacaatgtccaagacacagcagaacagaaagttcaactgcttcgtaattggcatcaacttcatggaaagaaagaagcgtatgacacattgattaaagatctcaaaaaagccaatctttgtactcttgcagagaaaattcagactatcatcctcaaggacattactagtgactcagaaaattcaaacttcagaaatgaaatccaaagcttggtctagagtgaaaaacaacaaattcagttctgagtatatgcaattagtgtttgaaaagattcttaatagctggctgtaaatactgcttggttttttactgggtacattttatcatttattagcgctgaagagccaacatatttgtagatttttaatatctcatgattctgcctccaaggatgtttaaaatctagttgggaaaacaaacttcatcaagagtaaatgcagtggcatgctaagtacccaaataggagtgtatgcagaggatgaaagattaagattatgctctggcatctaacatatgattctgtagtatgaatgtaatcagtgtatgttagtacaaatgtctatccacaggctaaccccactctatgaatcaatagaagaagctatgaccttttgctgaaatatcagttactgaacaggcaggccactttgcctctaaattacctctgataattctagagattttaccatatttctaaactttgtttataactctgagaagatcatatttatgtaaagtatatgtatttgagtgcagaatttaaataaggctctacctcaaagacctttgcacagtttattggtgtcatattatacaatatttcaattgtgaattcacatagaaaacattaaattataatgtttgactattatatatgtgtatgcattttactggctcaaaactacctacttctttctcaggcatcaaaagcattttgagcaggagagtattactagagctttgccacctctccatttttgccttggtgctcatcttaatggcctaatgcacccccaaacatggaaatatcaccaaaaaatacttaatagtccaccaaaaggcaagactgcccttagaaattctagcctggtttggagatactaactgctctcagagaaagtagctttgtgacatgtcatgaacccatgtttgcaatcaaagatgataaaatagattcttatttttcccccacccccgaaaatgttcaataatgtcccatgtaaaacctgctacaaatggcagcttatacatagcaatggtaaaatcatcatctggatttaggaattgctcttgtcataccctcaagtttctaagatttaagattctccttactactatcctacgtttaaatatctttgaaagtttgtattaaatgtgaattttaagaaataatatttatatttctgtaaatgtaaactgtgaagatagttataaactgaagcagatacctggaaccacctaaagaacttccatttatggaggatttttttgccccttgtgtttggaattataaaatataggtaaaagtacgtaattaaataatgtttttg

SEQ ID NO: 1075 - DNA, 1530 bp; single-stranded, linear
  immediate source library: GENBANK
  immediate source clone: g182447
agtggctctactttcagaagaaagtgtctctcttcctgcttaaacctctgtctctgacggtccctgccaatcgctctggtcgaccccaacacactaggaggacagacacaggctccaaactccactaaccagagctgtgattgtgcccgctgagtggactgcgttgtcagggagtgagtgctccatcatcgggagaatccaagcaggaccgccatggaggaaggtcaatattcagagatcgaggagcttcccaggaggcggtgttgcaggcgtgggactcagatcgtgctgctggggctggtgaccgccgctctgtgggctgggctgctgactctgcttctcctgtggcactgggacaccacacagagtctaaaacagctggaagagagggctgcccggaacgtctctcaagtttccaagaacttggaaagccaccacggtgaccagatggcgcagaaatcccagtccacgcagatttcacaggaactggaggaacttcgagctgaacagcagagattgaaatctcaggacttggagctgtcctggaacctgaacgggcttcaagcagatctgagcagcttcaagtcccaggaattgaacgagaggaacgaagcttcagatttgctggaaagactccgggaggaggtgacaaagctaaggatggagttgcaggtgtccagcggctttgtgtgcaacacgtgccctgaaaagtggatcaatttccaacggaagtgctactacttcggcaagggcaccaagcagtgggtccacgcccggtatgcctgtgacgacatggaagggcagctggtcagcatccacagcccggaggagcaggacttcctgaccaagcatgccagccacaccggctcctggattggccttcggaacttggacctgaagggagagtttatctgggtggatgggagccatgtggactacagcaactgggctccaggggagcccaccagccggagccagggcgaggactgcgtgatgatgcggggctccggtcgctggaacgacgccttctgcgaccgtaagctgggcgcctgggtgtgcgaccggctggccacatgcacgccgccagccagcgaaggttccgcggagtccatgggacctgattcaagaccagaccctgacggccgcctgcccaccccctctgcccctctccactcttgagcatggatacagccaggcccagagcaagaccctgaagacccccaaccacggcctaaaagcctctttgtggctgaaaggtccctgtgacattttctgccacccaaacggaggcagctgacacatctcccgctcctctatggcccctgccttcccaggagtacaccccaacagcaccctctccagatgggagtgcccccaacagcaccctctccagatgagagtacaccccaacagcaccctctccagatgcagccccatctcctcagcaccccaggacctgagtatccccagctcaggtggtgagtcctcctgtccagcctgcatcaataaaatggggcagtgatggcctcc

SEQ ID NO: 1076 - DNA, 2372 bp; single-stranded, linear
  immediate source library: GENBANK
  immediate source clone: g182473
ttctgggatggctatggagacccaaatgtctcagaatgtatgtcccagaaacctgtggctgcttcaaccattgacagttttgctgctgctggcttctgcagacagtcaagctgcagctcccccaaaggctgtgctgaaacttgagcccccgtggatcaacgtgctccaggaggactctgtgactctgacatgccagggggctcgcagccctgagagcgactccattcagtggttccacaatgggaatctcattcccacccacacgcagcccagctacaggttcaaggccaacaacaatgacagcggggagtacacgtgccagactggccagaccagcctcagcgaccctgtgcatctgactgtgctttccgaatggctggtgctccagacccctcacctggagttccaggagggagaaaccatcatgctgaggtgccacagctggaaggacaagcctctggtcaaggtcacattcttccagaatggaaaatcccagaaattctcccgtttggatcccaccttctccatcccacaagcaaaccacagtcacagtggtgattaccactgcacaggaaacataggctacacgctgttctcatccaagcctgtgaccatcactgtccaagtgcccagcatgggcagctcttcaccaatggggatcattgtggctgtggtcattgcgactgctgtagcagccattgttgctgctgtagtggccttgatctactgcaggaaaaagcggatttcagccaattccactgatcctgtgaaggctgcccaatttgagccacctggacgtcaaatgattgccatcagaaagagacaacttgaagaaaccaacaatgactatgaaacagctgacggcggctacatgactctgaaccccagggcacctactgacgatgataaaaacatctacctgactcttcctcccaacgaccatgtcaacagtaataactaaagagtaacgttatgccatgtggtcatactctcagcttgctagtggatgacaaaaagaggggaattgttaaaggaaaatttaaatggagactggaaaaatcctgagcaaacaaaaccacctggcccttagaaatagctttaactttgcttaaactacaaacacaagcaaaacttcacggggtcatactacatacaagcataagcaaaacttaacttggatcatttctggtaaatgcttatgttagaaataagacaaccccagccaatcacaagcagcctactaacatataattaggtgactagggactttctaagaagatacctacccccaaaaaacaattatgtaattgaaaaccaaccgattgcctttattttgcttccacattttcccaataaatacttgcctgtgacattttgccactggaacactaaacttcatgaattgcgcctcagatttttgctttaacatctttttttttttttgacagagtctcaatctgttacccaggctggagtgcagtggtgctatcttggctcactgcaaacccgcctcccaggtttaagcgattctcatgcctcagcctcccagtagctgggattagaggcatgtgcatcatacccagctaatttttgtattttttattttttatttttagtagagacagggtttcgcaatgttggccaggcgatctcgaacttctggcctctagcgatctgccgcctcggcctcccaaagtgctgggatgaccagcatcagccccaatgtccagcctctttaacatcttctttcctatgccctctctgtggatccctactgctggtttctgccttctccatgctgagaacaaaatcacctattcactgcttatgcagtcggaagctccagaagaacaaagagcccaattaccagaaccacattaagtctccattgttttgccttgggatttgagaagagaattagagaggtgaggatctggtatttcctggactaaattccccttggaagacgaagggatgctgcagttccaaaagagaaggactcttccagagtcatctacctgagtcccaaagctccctgtcctgaaagccacagacaatatggtcccaaatgactgactgcaccttctgtgcctcagccgttcttgacatcaagaatcttctgttccacatccacacagccaatacaattagtcaaaccactgttattaacagatgtagcaacatgagaaacgcttatgttacaggttacatgagagcaatcatgtaagtctatatgacttcagaaatgttaaaatagactaacctctaacaacaaattaaaagtgattgtttcaaggtgatgcaattattgatgacctattctatttgtctataatgatcatatattacctttgtaataaaacattataatc

SEQ ID NO: 1077 - DNA, 769 bp; single-stranded, linear
  immediate source library: GENBANK
  immediate source clone: g182482
ggccatcgccgcagatccagcgcccagagagacaccagagaacccaccatggccccctttgagcccctggcttctggcatcctgttgttgctgtggctgatagcccccagcagggcctgcacctgtgtcccaccccacccacagacggccttctgcaattccgacctcgtcatcagggccaagttcgtggggacaccagaagtcaaccagaccaccttataccagcgttatgagatcaagatgaccaagatgtataaagggttccaagccttaggggatgccgctgacatccggttcgtctacacccccgccatggagagtgtctgcggatacttccacaggtcccacaaccgcagcgaggagtttctcattgctggaaaactgcaggatggactcttgcacatcactacctgcagtttcgtggctccctggaacagcctgagcttagctcagcgccggggcttcaccaagacctacactgttggctgtgaggaatgcacagtgtttccctgtttatccatcccctgcaaactgcagagtggcactcattgcttgtggacggaccagctcctccaaggctctgaaaagggcttccagtcccgtcaccttgcctgcctgcctcgggagccagggctgtgcacctggcagtccctgcggtcccagatagcctgaatcctgcccggagtggaagctgaagcctgcacagtgtccaccctgttcccactcccatctttcttccggacaatgaaataaagagttaccacccagc

SEQ ID NO: 1078 - DNA, 822 bp; single-stranded, linear
  immediate source library: GENBANK
  immediate source clone: g182513
acggaacagatccggggactctcttccagcctccgaccgccctccgatttcctctccgcttgcaacctccgggaccatcttctcggccatctcctgcttctgggacctgccagcaccgtttttgtggttagctccttcttgccaaccaaccatgagctcccagattcgtcagaattattccaccgacgtggaggcagccgtcaacagcctggtcaatttgtacctgcaggcctcctacacctacctctctctgggcttctatttcgaccgcgatgatgtggctctggaaggcgtgagccacttcttccgcgaactggccgaggagaagcgcgagggctacgagcgtctcctgaagatgcaaaaccagcgtggcggccgcgctctcttccaggacatcaagaagccagctgaagatgagtggggtaaaaccccagacgccatgaaagctgccatggccctggagaaaaagctgaaccaggcccttttggatcttcatgccctgggttctgcccgcacggacccccatctctgtgacttcctggagactcacttcctagatgaggaagtgaagcttatcaagaagatgggtgaccacctgaccaacctccacaggctgggtggcccggaggctgggctgggcgagtatctcttcgaaaggctcactctcaagcacgactaagagccttctgagcccagcgacttctgaagggccccttgcaaagtaatagggcttctgcctaagcctctccctccagccaataggcagctttcttaactatcctaacaagccttggaccaaatggaaataaagctttttgatgc

SEQ ID NO: 1079 - DNA, 845 bp; single-stranded, linear
  immediate source library: GENBANK
  immediate source clone: g182525
tgggaggaggtggattccagcccccagccccagggctctgaatcgctgccagctcagccccctgcccagcctgccccacagcctgagccccagcaggccagagagcccagtcctgaggtgagctgctgtggcctgtggccaggcgaccccagcgctcccagaactgaggctggcagccagccccagcctcagccccaactgcgaggcagagagacaccaatgggaatcccaatggggaagtcgatgctggtgcttctcaccttcttggccttcgcctcgtgctgcattgctgcttaccgccccagtgagaccctgtgcggcggggagctggtggacaccctccagttcgtctgtggggaccgcggcttctacttcagcaggcccgcaagccgtgtgagccgtcgcagccgtggcatcgttgaggagtgctgtttccgcagctgtgacctggccctcctggagacgtactgtgctacccccgccaagtccgagagggacgtgtcgacccctccgaccgtgcttccggacaacttccccagataccccgtgggcaagttcttccaatatgacacctggaagcagtccacccagcgcctgcgcaggggcctgcctgccctcctgcgtgcccgccggggtcacgtgctcgccaaggagctcgaggcgttcagggaggccaaacgtcaccgtcccctgattgctctacccacccaagaccccgcccacgggggcgcccccccagagatggccagcaatcggaagtgagcaaaactgccgcaagtctgcagcccggcgccaccatcctgcagcctcctcctgaccacggacgtttccatcaggttccatcc

SEQ ID NO: 1080 - DNA, 2354 bp; single-stranded, linear
  immediate source library: GENBANK
  immediate source clone: g182573
gggaggaccccaatctaggcccaagagggaaaggccacgtgcctgtatgagcgtatgagcatgtgcatgcgcgtgtgtgcacagggtggtgcacctggcaggggtccttgagtgaggcatgccccattctgtagcagggaacctggaatgggctgtgtgttctgcaagaaattggagccggtggccacggccaaggaggatgctggcctggaaggggacttcagaagctacggggcagcagaccactatgggcctgaccccactaaggcccggcctgcatcctcatttgcccacatccccaactacagcaacttctcctctcaggccatcaaccctggcttccttgatagtggcaccatcaggggtgtgtcagggattggggtgaccctgttcattgccctgtatgactatgaggctcgaactgaggatgacctcaccttcaccaagggcgagaagttccacatcctgaacaatactgaaggtgactggtgggaggctcggtctctcagctccggaaaaactggctgcattcccagcaactacgtggcccctgttgactcaatccaagctgaagagtggtactttggaaagattgggagaaaggatgcagagaggcagctgctttcaccaggcaacccccagggggcctttctcattcgggaaagcgagaccaccaaaggtgcctactccctgtccatccgggactgggatcagaccagaggcgatcatgtgaagcattacaagatccgcaaactggacatgggcggctactacatcaccacacgggttcagttcaactcggtgcaggagctggtgcagcactacatggaggtgaatgacgggctgtgcaacctgctcatcgcgccctgcaccatcatgaagccgcagacgctgggcctggccaaggacgcctgggagatcagccgcagctccatcacgctggagcgccggctgggcaccggctgcttcggggatgtgtggctgggcacgtggaacggcagcactaaggtggcggtgaagacgctgaagccgggcaccatgtccccgaaggccttcctggaggaggcgcaggtcatgaagctgctgcggcacgacaagctggtgcagctgtacgccgtggtgtcggaggagcccatctacatcgtgaccgagttcatgtgtcacggcagcttgctggattttctcaagaacccagagggccaggatttgaggctgccccaattggtggacatggcagcccaggtagctgagggcatggcctacatggaacgcatgaactacattcaccgcgacctgagggcagccaacatcctggttggggagcggctggcgtgcaagatcgcagactttggcttggcgcgtctcatcaaggacgatgagtacaacccctgccaaggttccaagttccccatcaagtggacagccccagaagctgccctctttggcagattcaccatcaagtcagacgtgtggtcctttgggatcctgctcactgagctcatcaccaagggccgaatcccctacccaggcatgaataaacgggaagtgttggaacaggtggagcagggctaccacatgccgtgccctccaggctgcccagcatccctgtacgaggccatggaacagacctggcgtctggacccggaggagaggcctaccttcgagtacctgcagtccttcctggaggactacttcacctccgctgaaccacagtaccagcccggggatcagacatagcctgtccgggcatcaaccctctctggcggtggccaccagtccttgccaatccccagagctgttcttccaaagcccccaggctggcttagaaccccatagagtcctagcatcaccgaggacgtggctgctctgacaccacctagggcaacctacttgttttacagatggggcaaaaggaggcccagagctgatctctcatccgctctggccccaagcactatttcttccttttccacttaggcccctacatgcctgtagccctttctcactccatccccacccaaaagtgctcagaccttgtctagttatttataaactgtatgtacctccctcacttctctcctatcactgctttcctactctccttttatctcactctagtccaggtgccaagaatttcccttctaccctctattctcttgtgtctgtaagttacaaagtcaggaaaagtcttggctggacccctttcctgctgggtggatgcagtggtccaggactggggtctgggcccaggtttgagggagaagtttgcagagcacttcccacctctctgaatagtgtgtatgtgttgatttattgattctgtaaataagtaaaatgacaatatgaatcctcca

SEQ ID NO: 1081 - DNA, 964 bp; single-stranded, linear
  immediate source library: GENBANK
  immediate source clone: g182625
gaaagcggaggcagcgggggaagatggcggcggccgttccacagcgggcgtggaccgtggagcagctgcgcagtgagcagctgcccaagaaggatattatcaagtttctgcaggaacacggttcagattcgtttcttgcagaacataaattattaggaaacattaaaaatgtggccaagacagctaacaaggaccacttggttacagcctataaccatctttttgaaactaagcgttttaagggtactgaaagtataagtaaagtgtctgagcaagtaaaaaatgtgaagcttaatgaagataaacccaaagaaaccaagtctgaagagaccctggatgagggtccaccaaaatatactaaatctgttctgaaaaagggagataaaaccaactttcccaaaaagggagatgttgttcactgctggtatacaggaacactacaagatgggactgtttttgatactaatattcaaacaagtgcaaagaagaagaaaaatgccaagcctttaagttttaaggtcggagtaggcaaagttatcagaggatgggatgaagctctcttgactatgagtaaaggagaaaaggctcgactggagattgaaccagaatgggcttacggaaagaaaggacagcctgatgccaaaattccaccaaatgcaaaactcacttttgaagtggaattagtggatattgattgaaataggcagtgcttcagctctaaggatattagcaacaatgataaaacttggccttgaagaaatttacacaactagttagaacttgttactattgtaaaggaagagtcaactggaaaattcaaggagttaataaaatttgtttacttggtcccagcttttgagagataaatcccttatgaatccctggtctaaaatactttcctacagctgtgtaaaatactggtcaaggagaactttttccttttacctcatgttgtaaacttaag

SEQ ID NO: 1082 - DNA, 994 bp; single-stranded, linear
  immediate source library: GENBANK
  immediate source clone: g182739
atggagacaaattcctctctccccacgaacatctctggagggacacctgctgtatctgctggctatctcttcctggatatcatcacttatctggtatttgcagtcacctttgtcctcggggtcctgggcaacgggcttgtgatctgggtggctggattccggatgacacacacagtcaccaccatcagttacctgaacctggccgtggctgacttctgtttcacctccactttgccattcttcatggtcaggaaggccatgggaggacattggcctttcggctggttcctgtgcaaattcgtctttaccatagtggacatcaacttgttcggaagtgtcttcctgatcgccctcattgctctggaccgctgtgtttgcgtcctgcatccagtctggacccagaaccaccgcaccgtgagcctggccaagaaggtgatcattgggccctgggtgatggctctgctcctcacattgccagttatcattcgtgtgactacagtacctggtaaaacggggacagtagcctgcacttttaacttttcgccctggaccaacgaccctaaagagaggataaaggtggccgttgccatgttgacggtgagaggcatcatccggttcatcattggcttcagcgcacccatgtccatcgttgctgtcagttatgggcttattgccaccaagatccacaagcaaggcttgattaagtccagtcgtcccttacgggtcctctcctttgtcgcagcagccttttttctctgctggtccccatatcaggtggtggcccttatagccacagtcagaatccgtgagttattgcaaggcatgtacaaagaaattggtattgcagtggatgtgacaagtgccctggccttcttcaacagctgcctcaaccccatgctctatgtcttcatgggccaggacttccgggagaggctgatccacgcccttcccgccagtctggagagggccctgaccgaggactcaacccaaacca

SEQ ID NO: 1083 - DNA, 2631 bp; single-stranded, linear
  immediate source library: GENBANK
  immediate source clone: g182741
ggcacgaggaacaacctatttgcaaagttggcgcaaacattcctgcctgacaggaccatggacacaggttgtagagatagagatggctctggctgtgcattcagcagattctgtagatagaattaataggacttggatgggattgtggtgagagaaagtgaaatgaaagataagttctagtttggaagttttaacaactgaatgtttaaactcaaatagacacaaaatattggaagagtggcaggtttgggaggatgagacaatcaactgtttggttgagccacgttaggtttgaaatgtctacgggatcccgtggggagaggttatatcagactggagcaccagagagaggccaaggctgatagtttagatgaaaagagagcatgatattttaagccctgagactggataatatcacctatagaaagactatatagagataagagaggtggggaacaagtaaaagctgcgggacactcctaaatttagagtcaaatttagagcagaaaatactagcaaaggggactgaaaagcggtggccaattgagcttcaaatgcaagtgaaagtgtgttgtgtgtacatttatcatctcatggcacaggaaaaacgtgatttaaggagaaggaagcgatccaatgggaagaagagatccaatggatcctctatcacgaagatattgagataagaaccaatatggatttgcacccactgcatttgcagccttgaggtcataagcatcctcaggaaaatgcaccaggtgctgctggcaagatggaaaccaacttctccactcctctgaatgaatatgaagaagtgtcctatgagtctgctggctacactgttctgcggatcctcccattggtggtgcttggggtcacctttgtcctcggggtcctgggcaatgggcttgtgatctgggtggctggattccggatgacacgcacagtcaccaccatctgttacctgaacctggccctggctgacttttctttcacggccacattaccattcctcattgtctccatggccatgggagaaaaatggccttttggctggttcctgtgtaagttaattcacatcgtggtggacatcaacctctttggaagtgtcttcttgattggtttcattgcactggaccgctgcatttgtgtcctgcatccagtctgggcccagaaccaccgcactgtgagtctggccatgaaggtgatcgtcggaccttggattcttgctctagtccttaccttgccagttttcctctttttgactacagtaactattccaaatggggacacatactgtactttcaactttgcatcctggggtggcacccctgaggagaggctgaaggtggccattaccatgctgacagccagagggattatccggtttgtcattggctttagcttgccgatgtccattgttgccatctgctatgggctcattgcagccaagatccacaaaaagggcatgattaaatccagccgtcccttacgggtcctcactgctgtggtggcttctttcttcatctgttggtttccctttcaactggttgcccttctgggcaccgtctggctcaaagagatgttgttctatggcaagtacaaaatcattgacatcctggttaacccaacgagctccctggccttcttcaacagctgcctcaaccccatgctttacgtctttgtgggccaagacttccgagagagactgatccactccctgcccaccagtctggagagggccctgtctgaggactcagccccaactaatgacacggctgccaattctgcttcacctcctgcagagactgagttacaggcaatgtgaggatggggtcagggatattttgagttctgttcatcctaccctaatgccagttccagcttcatctacccttgagtcatattgaggcattcaaggatgcacagctcaagtatttattcaggaaaaatgcttttgtgtccctgatttggggctaagaaatagacagtcaggctactaaaatattagtgttattttttgttttttgacttctgcctataccctggggtaagtggagttgggaaatacaagaagagaaagaccagtggggatttgtaagacttagatgagatagcgcataataaggggaagactttaaagtataaagtaaaatgtttgctgtaggttttttatagctattaaaaaaaatcagattatggaagttttcttctatttttagtttgctaagagttttctgtttctttttcttacatcatgagtggactttgcattttatcaaatgcattttctacatgtattaagatggtcatattattcttcttcttttatgtaaatcattataaataatgttcattaagttctgaatgttaaactactcttgaattcctggaataaaccacacttagtcctgatgtactttaaatatttatatctcacaggagttggttagaatttctgtgtttatgtttatatactgttatttcactttttctactatccttgctaagttttcatagaaaataaggaacaaagagaaacttgtaatggtctctgaaaaggaattgagaagtaattcctctgattctgttttctggtgttatatctttattaaatattcagaaaaattc

SEQ ID NO: 1084 - DNA, 1237 bp; single-stranded, linear
  immediate source library: GENBANK
  immediate source clone: g182860
gtcgccagccgagccacatcgctcagaacacctatggggaaggtgaaggtcggagtcaacggatttggtcgtattgggcgcctggtcaccagggctgcttttaactctggtaaagtggatattgttgccatcaatgaccccttcattgacctcaactacatggtttacatgttccaatatgattccacccatggcaaattccatggcaccgtcaaggctgagaacgggaagcttgtgatcaatggaaatcccatcaccatcttccaggagcgagatccctccaaaatcaagtggggcgatgctggcgctgagtacgtcgtggagtccactggcgtcttcaccaccatggagaaggctggggctcatttgcaggggggagccaaaagggtcatcatctctgccccctctgctgatgcccccatgttcgtcatgggtgtgaaccatgagaagtatgacaacagcctcaagatcatcagcaatgcctcctgcaccaccaactgcttagcacccctggccaaggtcatccatgacaactttggtatcgtggaaggactcatgaccacagtccatgccatcactgccacccagaagactgtggatggcccctccgggaaactgtggcgtgatggccgcggggctctccagaacatcatccctgcctctactggcgctgccaaggctgtgggcaaggtcatccctgagctgaacgggaagctcactggcatggccttccgtgtccccactgccaacgtgtcagtggtggacctgacctgccgtctagaaaaacctgccaaatatgatgacatcaagaaggtggtgaagcaggcgtcggagggccccctcaagggcatcctgggctacactgagcaccaggtggtctcctctgacttcaacagcgacacccactcctccacctttgacgctggggctggcattgccctcaacgaccactttgtcaagctcatttcctggtatgacaacgaatttggctacagcaacagggtggtggacctcatggcccacatggcctccaaggagtaagacccctggaccaccagccccagcaagagcacaagaggaagagagagaccctcactgctggggagtccctgccacactcagtcccccaccacactgaatctcccctcctcacagttgccatgtagacccttgaagaggggaggggcctagggcgccgcaccttgtcatgtacctcaataaagtacctgggcttacc

SEQ ID NO: 1085 - DNA, 1343 bp; single-stranded, linear
  immediate source library: GENBANK
  immediate source clone: g182939
ggcagtggctgggaggcagcggcccaattagtgtcgtgcggcccgtggcgaggcgaggtccggggagcgagcgagcaagcaaggcgggaggggtggccggagctgcggcggctggcacaggaggaggagcccgggcgggcgaggggcggccggagagcgccagggcctgagctgccggagcggcgcctgtgagtgagtgcagaaagcaggcgcccgcgcgctagccgtggcaggagcagcccgcacgccgcgctctctccctgggcgacctgcagtttgcaatatgactttggaggaattctcggctggagagcagaagaccgaaaggatggataaggtgggggatgccctggaggaagtgctcagcaaagccctgagtcagcgcacgatcactgtcggggtgtacgaagcggccaagctgctcaacgtcgaccccgataacgtggtgttgtgcctgctggcggcggacgaggacgacgacagagatgtggctctgcagatccacttcaccctgatccaggcgttttgctgcgagaacgacatcaacatcctgcgcgtcagcaacccgggccggctggcggagctcctgctcttggagaccgacgctggccccgcggcgagcgagggcgccgagcagcccccggacctgcactgcgtgctggtgacgaatccacattcatctcaatggaaggatcctgccttaagtcaacttatttgtttttgccgggaaagtcgctacatggatcaatgggttccagtgattaatctccctgaacggtgatggcatctgaatgaaaataactgaaccaaattgcactgaagtttttgaaatacctttgtagttactcaagcagttactccctacactgatgcaaggattacagaaactgatgccaaggggctgagtgagttcaactacatgttctgggggcccggagatagatgactttgcagatggaaagaggtgaaaatgaagaaggaagctgtgttgaaacagaaaaataagtcaaaaggaacaaaaattacaaagaaccatgcaggaaggaaaactatgtattaatttagaatggttgagttacattaaaataaaccaaatatgttaaagtttaagtgtgcagccatagtttgggtatttttggtttatatgccctcaagtaaaagaaaagccgaaagggttaatcatatttgaaaaccatattttattgtattttgatgagatattaaattctcaaagttttattataaattctactaagttattttatgacatgaaaagttatttatgctataaattttttgaaacacaatacctacaataaactggtatgaataattgcatcatt

SEQ ID NO: 1086 - DNA, 2943 bp; single-stranded, linear
  immediate source library: GENBANK
  immediate source clone: g183046
gaagctggactgcagctggtttcaggaacttctcttgacgagaagagagaccaaggaggccaagcaggggctgggccagaggtgccaacatggggaaactgaggctcggctcggaaaggtgaagtaacttgtccaagatcacaaagctggtgaacatcaagttggtgctatggcaaggctgggaaactgcagcctgacttgggctgccctgatcatcctgctgctccccggaagtctggaggagtgcgggcacatcagtgtctcagcccccatcgtccacctgggggatcccatcacagcctcctgcatcatcaagcagaactgcagccatctggacccggagccacagattctgtggagactgggagcagagcttcagcccgggggcaggcagcagcgtctgtctgatgggacccaggaatctatcatcaccctgccccacctcaaccacactcaggcctttctctcctgctgcctgaactggggcaacagcctgcagatcctggaccaggttgagctgcgcgcaggctaccctccagccataccccacaacctctcctgcctcatgaacctcacaaccagcagcctcatctgccagtgggagccaggacctgagacccacctacccaccagcttcactctgaagagtttcaagagccggggcaactgtcagacccaaggggactccatcctggactgcgtgcccaaggacgggcagagccactgctgcatcccacgcaaacacctgctgttgtaccagaatatgggcatctgggtgcaggcagagaatgcgctggggaccagcatgtccccacaactgtgtcttgatcccatggatgttgtgaaactggagccccccatgctgcggaccatggaccccagccctgaagcggcccctccccaggcaggctgcctacagctgtgctgggagccatggcagccaggcctgcacataaatcagaagtgtgagctgcgccacaagccgcagcgtggagaagccagctgggcactggtgggccccctccccttggaggcccttcagtatgagctctgcgggctcctcccagccacggcctacaccctgcagatacgctgcatccgctggcccctgcctggccactggagcgactggagccccagcctggagctgagaactaccgaacgggcccccactgtcagactggacacatggtggcggcagaggcagctggaccccaggacagtgcagctgttctggaagccagtgcccctggaggaagacagcggacggatccaaggttatgtggtttcttggagaccctcaggccaggctggggccatcctgcccctctgcaacaccacagagctcagctgcaccttccacctgccttcagaagcccaggaggtggcccttgtggcctataactcagccgggacctctcgccccaccccggtggtcttctcagaaagcagaggcccagctctgaccagactccatgccatggcccgagaccctcacagcctctgggtaggctgggagccccccaatccatggcctcagggctatgtgattgagtggggcctgggcccccccagcgcgagcaatagcaacaagacctggaggatggaacagaatgggagagccacggggtttctgctgaaggagaacatcaggccctttcagctctatgagatcatcgtgactcccttgtaccaggacaccatgggaccctcccagcatgtctatgcctactctcaagaaatggctccctcccatgccccagagctgcatctaaagcacattggcaagacctgggcacagctggagtgggtgcctgagccccctgagctggggaagagcccccttacccactacaccatcttctggaccaacgctcagaaccagtccttctccgccatcctgaatgcctcctcccgtggctttgtcctccatggcctggagcccgccagtctgtatcacatccacctcatggctgccagccaggctggggccaccaacagtacagtcctcaccctgatgaccttgaccccagaggggtcggagctacacatcatcctgggcctgttcggcctcctgctgttgctcacctgcctctgtggaactgcctggctctgttgcagccccaacaggaagaatcccctctggccaagtgtcccagacccagctcacagcagcctgggctcctgggtgcccacaatcatggaggaggatgccttccagctgcccggccttggcacgccacccatcaccaagctcacagtgctggaggaggatgaaaagaagccggtgccctgggagtcccataacagctcagagacctgtggcctccccactctggtccagacctatgtgctccagggggacccaagagcagtttccacccagccccaatcccagtctggcaccagcgatcaggtcctttatgggcagctgctgggcagccccacaagcccagggccagggcactatctccgctgtgactccactcagcccctcttggcgggcctcacccccagccccaagtcctatgagaacctctggttccaggccagccccttggggaccctggtaaccccagccccaagccaggaggacgactgtgtctttgggccactgctcaacttccccctcctgcaggggatccgggtccatgggatggaggcgctggggagcttctagggcttcctggggttcccttcttgggcctgcctcttaaaggcctgagctagctggagaagaggggagggtccataagcccatgactaaaaactaccccagcccaggctctcaccatctccagtcaccagcatctccctctcctcccaatctccataggctgggcctcccaggcgatctgcatactttaaggaccagatcatgctccatccagccccacccaatggccttttgtgcttgtttcctataacttcagtattgtaaac

SEQ ID NO: 1087 - DNA, 6757 bp; single-stranded, linear
  immediate source library: GENBANK
  immediate source clone: g183083
cggccccagaaaacccgagcgagtagggggcggcgcgcaggagggaggagaactgggggcgcgggaggctggtgggtgtcgggggtggagatgtagaagatgtgacgccgcggcccggcgggtgccagattagcggacggctgcccgcggttgcaacgggatcccgggcgctgcagcttgggaggcggctctccccaggcggcgtccgcggagacacccatccgtgaaccccaggtcccgggccgccggctcgccgcgcaccaggggccggcggacagaagagcggccgagcggctcgaggctgggggaccgcgggcgcggccgcgcgctgccgggcgggaggctggggggccggggccggggccgtgccccggagcgggtcggaggccggggccggggccgggggacggcggctccccgcgcggctccagcggctcggggatcccggccgggccccgcagggaccatggcagccgggagcatcaccacgctgcccgccttgcccgaggatggcggcagcggcgccttcccgcccggccacttcaaggaccccaagcggctgtactgcaaaaacgggggcttcttcctgcgcatccaccccgacggccgagttgacggggtccgggagaagagcgaccctcacatcaagctacaacttcaagcagaagagagaggagttgtgtctatcaaaggagtgtgtgctaaccgttacctggctatgaaggaagatggaagattactggcttctaaatgtgttacggatgagtgtttcttttttgaacgattggaatctaataactacaatacttaccggtcaaggaaatacaccagttggtatgtggcactgaaacgaactgggcagtataaacttggatccaaaacaggacctgggcagaaagctatactttttcttccaatgtctgctaagagctgattttaatggccacatctaatctcatttcacatgaaagaagaagtatattttagaaatttgttaatgagagtaaaagaaaataaatgtgtatagctcagtttggataattggtcaaacaattttttatccagtagtaaaatatgtaaccattgtcccagtaaagaaaaataacaaaagttgtaaaatgtatattctcccttttatattgcatctgctgttacccagtgaagcttacctagagcaatgatctttttcacgcatttgctttattcgaaaagaggcttttaaaatgtgcatgtttagaaacaaaatttcttcatggaaatcatatacattagaaaatcacagtcagatgtttaatcaatccaaaatgtccactatttcttatgtcattcgttagtctacatgtttctaaacatataaatgtgaatttaatcaattcctttcatagttttataattctctggcagttccttatgatagagtttataaaacagtcctgtgtaaactgctggaagttcttccacagtcaggtcaattttgtcaaacccttctctgtacccatacagcagcagcctagcaactctgctggtgatgggagttgtattttcagtcttcgccaggtcattgagatccatccactcacatcttaagcattcttcctggcaaaaatttatggtgaatgaatatggctttaggcggcagatgatatacatatctgacttcccaaaagctccaggatttgtgtgctgttgccgaatactcaggacggacctgaattctgattttataccagtctcttcaaaaacttctcgaaccgctgtgtctcctacgtaaaaaaagagatgtacaaatcaataataattacacttttagaaactgtatcatcaaagattttcagttaaagtagcattatgtaaaggctcaaaacattaccctaacaaagtaaagttttcaatacaaattctttgccttgtggatatcaagaaatcccaaaatattttcttaccactgtaaattcaagaagcttttgaaatgctgaatatttctttggctgctacttggaggcttatctacctgtacatttttggggtcagctctttttaacttcttgctgctctttttcccaaaaggtaaaaatatagattgaaaagttaaaacattttgcatggctgcagttcctttgtttcttgagataagattccaaagaacttagattcatttcttcaacaccgaaatgctggaggtgtttgatcagttttcaagaaacttggaatataaataattttataattcaacaaaggttttcacattttataaggttgatttttcaattaaatgcaaatttgtgtggcaggatttttattgccattaacatatttttgtggctgctttttctacacatccagatggtccctctaactgggctttctctaattttgtgatgttctgtcattgtctcccaaagtatttaggagaagccctttaaaaagctgccttcctctaccactttgctggaaagcttcacaattgtcacagacaaagatttttgttccaatactcgttttgcctctatttttcttgtttgtcaaatagtaaatgatatttgcccttgcagtaattctactggtgaaaaacatgcaaagaagaggaagtcacagaaacatgtctcaattcccatgtgctgtgactgtagactgtcttaccatagactgtcttacccatcccctggatatgctcttgttttttccctctaatagctatggaaagatgcatagaaagagtataatgttttaaaacataaggcattcatctgccatttttcaattacatgctgacttcccttacaattgagatttgcccataggttaaacatggttagaaacaactgaaagcataaaagaaaaatctaggccgggtgcagtggctcatgcctatattccctgcactttgggaggccaaagcaggaggatcgcttgagcccaggagttcaagaccaacctggtgaaaccccgtctctacaaaaaaacacaaaaaatagccaggcatggtggcgtgtacatgtggtctcagatacttgggaggctgaggtgggagggttgatcacttgaggctgagaggtcaaggttgcagtgagccataatcgtgccactgcagtccagcctaggcaacagagtgagactttgtctcaaaaaaagagaaattttccttaataagaaaagtaatttttactctgatgtgcaatacatttgttattaaatttattatttaagatggtagcactagtcttaaattgtataaaatatcccctaacatgtttaaatgtccatttttattcattatgctttgaaaaataattatggggaaatacatgtttgttattaaatttattattaaagatagtagcactagtcttaaatttgatataacatctcctaacttgtttaaatgtccatttttattctttatgcttgaaaataaattatggggatcctatttagctcttagtaccactaatcaaaagttcggcatgtagctcatgatctatgctgtttctatgtcgtggaagcaccggatgggggtagtgagcaaatctgccctgctcagcagtcaccatagcagctgactgaaaatcagcactgcctgagtagttttgatcagtttaacttgaatcactaactgactgaaaattgaatgggcaaataagtgcttttgtctccagagtatgcgggagacccttccacctcaagatggatatttcttccccaaggatttcaagatgaattgaaatttttaatcaagatagtgtgctttattctgttgtattttttattattttaatatactgtaagccaaactgaaataacatttgctgttttataggtttgaagaacataggaaaaactaagaggttttgtttttatttttgctgatgaagagatatgtttaaatatgttgtattgttttgtttagttacaggacaataatgaaatggagtttatatttgttatttctattttgttatatttaataatagaattagattgaaataaaatataatgggaaataatctgcagaatgtgggtttcctggtgtttcctctgactctagtgcactgatgatctctgataaggctcagctgctttatagttctctggctaatgcagcagatactcttcctgccagtggtaatacgattttttaagaaggcagtttgtcaattttaatcttgtggatacctttatactcttagggtattattttatacaaaagccttgaggattgcattctattttctatatgaccctcttgatatttaaaaaacactatggataacaattcttcatttacctagtattatgaaagaatgaaggagttcaaacaaatgtgtttcccagttaactagggtttactgtttgagccaatataaatgtttaactgtttgtgatggcagtattcctaaagtacattgcatgttttcctaaatacagagtttaaataatttcagtaattcttagatgattcagcttcatcattaagaatatcttttgttttatgttgagttagaaatgccttcatatagacatagtctttcagacctctactgtcagttttcatttctagctgctttcagggttttatgaattttcaggcaaagctttaatttatactaagcttaggaagtatggctaatgccaacggcagtttttttcttcttaattccacatgactgaggcatatatgatctctgggtaggtgagttgttgtgacaaccacaagcactttttttttttttaaagaaaaaaaggtagtgaatttttaatcatctggactttaagaaggattctggagtatacttaggcctgaaattatatatatttggcttggaaatgtgtttttcttcaattacatctacaagtaagtacagctgaaattcagaggacccataagagttcacatgaaaaaaatcaattcatttgaaaaggcaagatgcaggagagaggaagccttgcaaacctgcagactgctttttgcccaatatagattgggtaaggctgcaaaacataagcttaattagctcacatgctctgctctcacgtggcaccagtggatagtgtgagagaattaggctgtagaacaaatggccttctctttcagcattcacaccactacaaaatcatcttttatatcaacagaagaataagcataaactaagcaaaaggtcaataagtacctgaaaccaagattggctagagatatatcttaatgcaatccattttctgatggattgttacgagttggctatataatgtatgtatggtattttgatttgtgtaaaagttttaaaaatcaagctttaagtacatggacatttttaaataaaatatttaaagacaatttagaaaattgccttaatatcattgttggctaaatagaataggggacatgcatattaaggaaaaggtcatggagaaataatattggtatcaaacaaatacattgatttgtcatgatacacattgaatttgatccaatagtttaaggaataggtaggaaaatttggtttctatttttcgatttcctgtaaatcagtgacataaataattcttagcttattttatatttccttgtcttaaatactgagctcagtaagttgtgttaggggattatttctcagttgagactttcttatatgacattttactatgttttgacttcctgactattaaaaataaatagtagaaacaattttcataaagtgaagaattatataatcactgctttataactgactttattatatttatttcaaagttcatttaaaggctactattcatcctctgtgatggaatggtcaggaatttgttttctcatagtttaattccaacaacaatattagtcgtatccaaaataacctttaatgctaaactttactgatgtatatccaaagcttctccttttcagacagattaatccagaagcagtcataaacagaagaataggtggtatgttcctaatgatattatttctactaatggaataaactgtaatattagaaattatgctgctaattatatcagctctgaggtaatttctgaaatgttcagactcagtcggaacaaattggaaaatttaaatttttattcttagctataaagcaagaaagtaaacacattaatttcctcaacatttttaagccaattaaaaatataaaagatacacaccaatatcttcttcaggctctgacaggcctcctggaaacttccacatatttttcaactgcagtataaagtcagaaaataaagttaacataactttcactaacacacacatatgtagatttcacaaaatccacctataattggtcaaagtggttgagaatatattttttagtaattgcatgcaaaatttttctagcttccatcctttctccctcgtttcttctttttttgggggagctggtaactgatgaaatcttttcccaccttttctcttcaggaaatataagtggttttgtttggttaacgtgatacattctgtatgaatgaaacattggagggaaacatctactgaatttctgtaatttaaaatattttgctgctagttaactatgaacagatagaagaatcttacagatgctgctataaataagtagaaaatataaatttcatcactaaaatatgctattttaaaatctatttcctatattgtatttctaatcagatgtattactcttattatttctattgtatgtgttaatgattttatgtaaaaatgtaattgcttttcatgagtagtatgaataaaattgattagtttgtg

SEQ ID NO: 1088 - DNA, 856 bp; single-stranded, linear
  immediate source library: GENBANK
  immediate source clone: g183260
cttgttcggggcgctccgctggcttcttggacaattgcgccatgtgtgctgctcggctagcggcggcggcggcccagtcggtgtatgccttctcggcgcgcccgttggccggcggggagcctgtgagcctgggctccctgcggggcaaggtactacttatcgagaatgtggcgtccctctgaggcaccacggtccgggactacacccagatgaacgagctgcagcggcgcctcggaccccggggcctggtggtgctcggcttcccgtgcaaccagtttgggcatcaggagaacgccaagaacgaagagattctgaattccctcaagtacgtccggcctggtggtgggttcgagcccaacttcatgctcttcgagaagtgcgaggtgaacggtgcgggggcgcaccctctcttcgccttcctgcgggaggccctgccagctcccagcgacgacgccaccgcgcttatgaccgaccccaagctcatcacctggtctccggtgtgtcgcaacgatgttgcctggaactttgagaagttcctggtgggccctgacggtgtgcccctacgcaggtacagccgccgcttccagaccattgacatcgagcctgacatcgaagccctgctgtctcaagggcccagctgtgcctagggcgcccctcctaccccggctgcttggcagttgcagtgctgctgtctcgggggggttttcatctatgagggtgtttcctctaaacctacgagggaggaacaccttgatcttacagaaaataccacctcgagatgggtgctggtcctgttgatcccagtctctgccagaccaaggcgagtttccccactaataaagtgccgggtgtcagc

SEQ ID NO: 1089 - DNA, 1480 bp; single-stranded, linear
  immediate source library: GENBANK
  immediate source clone: g183361
ccgagagaagaaaagcaggtggaaggagaggaagctgatgccgtggggtttacagcaggaaaatccgtggagacagcagatccgagaagcggcgatgtttgcgtagaaccctgtacgtgcttccttcggcctgtcgctcttcccttctctctgaccagcaccatgcttctcctggtgacaagccttctgctctgtgagttaccacacccagcattcctcctgatcccagagaaatcggatctgcgaacagtggcaccagcctctagtctcaatgtgaggtttgactccaggacgatgaatttaagctgggactgccaagaaaacacaaccttcagcaagtgtttcttaactgacaagaagaacagagtcgtggaacccaggctcagtaacaacgaatgttcgtgcacatttcgtgaaatttgtctgcatgaaggagtcacatttgaggttcacgtgaatactagtcaaagaggatttcaacagaaactgctttatccaaattcaggaagggagggtaccgctgctcagaatttctcctgtttcatctacaatgcggatttaatgaactgtacctgggcgaggggtccgacggccccccgtgacgtccagtattttttgtacatacgaaactcaaagagaaggagggagatccggtgtccttattacatacaagactcaggaacccatgtgggatgtcacctggataacctgtcaggattaacgtctcgcaattactttctggttaacggaaccagccgagaaattggcatccaattctttgattcacttttggacacaaagaaaatagaacgattcaaccctcccagcaatgtcaccgtacgttgcaacacgacgcactgcctcgtacggtggaaacagcccaggacctatcagaagctgtcgtacctggactttcagtaccagctggacgtccacagaaagaatacccagcctggcacggaaaacctactgattaatgtttctggtgatttggaaaatagatacaactttccaagctctgagcccagagcaaaacacagtgtgaagatcagagctgcagacgtccgcatcttgaattggagctcctggagtgaagccattgaatttggttctgacgacgggaacctcggctctgtgtacatttatgtgctcctaatcgtgggaacccttgtctgtggcatcgtcctcggcttcctctttaaaaggttccttaggatacagcggctgttcccgccagttccacagatcaaagacaaactgaatgataaccatgaggtggaagacgagatgggaccgcagcgtcaccaccggtgtggctggaatctgtatcccactcctgggccttctcccgggtcggggtcttctccaaggttggggtcagagtcatctctgtgagctccatcaggagaaactgaggcagggtggtggtcaagaaaaggaggagaagacggtagagagggccaggcacggtggctcatct

SEQ ID NO: 1090 - DNA, 3142 bp; single-stranded, linear
  immediate source library: GENBANK
  immediate source clone: g183390
tgggcagaaggcagaaaaccagcagagtcacagaggagatggccaactgccaaatagccatcttgtaccagagattccagagagtggtctttggaatttcccaactcctttgcttcagtgccctgatctctgaactaacaaaccagaaagaagtggcagcatggacttatcattacagcacaaaagcatactcatggaatatttcccgtaaatactgccagaatcgctacacagacttagtggccatccagaataaaaatgaaattgattacctcaataaggtcctaccctactacagctcctactactggattgggatccgaaagaacaataagacatggacatgggtgggaaccaaaaaggctctcaccaacgaggctgagaactgggctgataatgaacctaacaacaaaaggaacaacgaggactgcgtggagatatacatcaagagtccgtcagcccctggcaagtggaatgatgagcactgcttgaagaaaaagcacgcattgtgttacacagcctcctgccaggacatgtcctgcagcaaacaaggagagtgcctcgagaccatcgggaactacacctgctcctgttaccctggattctatgggccagaatgtgaatacgtgagagagtgtggagaacttgagctccctcaacacgtgctcatgaactgcagccaccctctgggaaacttctcttttaactcgcagtgcagcttccactgcactgacgggtaccaagtaaatgggcccagcaagctggaatgcttggcttctggaatctggacaaataagcctccacagtgtttagctgcccagtgcccacccctgaagattcctgaacgaggaaacatgatctgccttcattctgcaaaagcattccagcatcagtctagctgcagcttcagttgtgaagagggatttgcattagttggaccggaagtggtgcaatgcacagcctcgggggtatggacagccccagccccagtgtgtaaagctgtgcagtgtcagcacctggaagcccccagtgaaggaaccatggactgtgttcatccgctcactgcttttgcctatggctccagctgcaaatttgagtgccagcccggctacagagtgaggggcttggacatgctccgctgcattgactctggacactggtctgcacccttgccaacctgtgaggctatttcgtgtgagccgctggagagtcctgtccacggaagcatggattgctctccatccttgagagcgtttcagtatgacaccaactgtagcttccgctgtgctgaaggtttcatgctgagaggagccgatatagttcggtgtgataacttgggacagtggacagcaccagccccagtctgtcaagctttgcagtgccaggatctcccagttccaaatgaggcccgggtgaactgctcccaccccttcggtgcctttaggtaccagtcagtctgcagcttcacctgcaatgaaggcttgctcctggtgggagcaagtgtgctacagtgcttggctactggaaactggaattctgttcctccagaatgccaagccattccctgcacacctttgctaagccctcagaatggaacaatgacctgtgttcaacctcttggaagttccagttataaatccacatgtcaattcatctgtgacgagggatattctttgtctggaccagaaagattggattgtactcgatcgggacgctggacagactccccaccaatgtgtgaagccatcaagtgcccagaactctttgccccagagcagggcagcctggattgttctgacactcgtggagaattcaatgttggctccacctgtcatttctcttgtaacaatggctttaagctggaggggcccaataatgtggaatgcacaacttctggaagatggtcagctactccaccaacctgcaaaggcatagcatcacttcctactccagggttgcaatgtccagccctcaccactcctgggcagggaaccatgtactgtaggcatcatccgggaacctttggttttaataccacttgttactttggctgcaacgctggattcacactcataggagacagcactctcagctgcagaccttcaggacaatggacagcagtaactccagcatgcagagctgtgaaatgctcagaactacatgttaataagccaatagcgatgaactgctccaacctctggggaaacttcagttatggatcaatctgctctttccattgtctagagggccagttacttaatggctctgcacaaacagcatgccaagagaatggccactggtcaactaccgtgccaacctgccaagcaggaccattgactatccaggaagccctgacttactttggtggagcggtggcttctacaataggtctgataatgggtgggacgctcctggctttgctaagaaagcgtttcagacaaaaagatgatgggaaatgccccttgaatcctcacagccacctaggaacatatggagtttttacaaacgctgcatttgacccgagtccttaaggtttccataaacacccatgaatcaaagacatggaattaccttagattagctctggaccagcctgttggacccgctctggaccaaccctgtttcctgagtttgggattgtggtacaatctcaaattctcaacctaccaccccttcctgtcccacctcttctcttcctgtaacacaagccacagaagccaggagcaaatgtttctgcagtagtctctgtgctttgactcacctgttacttgaaataccagtgaaccaaagagactggagcatctgactcacaagaagaccagactgtggagaaataaaaatacctctttattttttgattgaaggaaggttttctccactttgttggaaagcaggtggcatctctaattggaagaaattcctgtagcatcttctggagtctccagtggttgctgttgatgaggcctcttggacctctgctctgaggcttccagagagtcctctggatggcaccagaggctgcagaaggccaagaatcaagctagaaggccacatgtcaccgtggaccttcctgccaccagtcactgtccctcaaatgacccaaagaccaatattcaaatgcgtaattaaaagaattttcccc

SEQ ID NO: 1091 - DNA, 1276 bp; single-stranded, linear
  immediate source library: GENBANK
  immediate source clone: g183416
cagcgcaacgaggagaaggcgcagcgtgaggccaacaaaaagatcgagaagcagctgcagaaggacaagcaggtctaccgggccacgcaccgcctgctgctgctgggtgctggagaatctggtaaaagcaccattgtgaagcagatgaggatcctgcatgttaatgggtttaatggagagggcggcgaagaggacccgcaggctgcaaggagcaacagcgatggcagtgagaaggcaaccaaagtgcaggacatcaaaaacaacctgaaagaggcgattgaaaccattgtggccgccatgagcaacctggtgccccccgtggagctggccaaccccgagaaccagttcagagtggactacattctgagtgtgatgaacgtgcctgactttgacttccctcccgaattctatgagcatgccaaggctctgtgggaggatgaaggagtgcgtgcctgctacgaacgctccaacgagtaccagctgattgactgtgcccagtacttcctggacaagatcgacgtgatcaagcaggctgactatgtgccgagcgatcaggacctgcttcgctgccgtgtcctgacttctggaatctttgagaccaagttccaggtggacaaagtcaacttccacatgtttgacgtgggtggccagcgcgatcaacgccgcaagtggatccagtgcttcaacgatgtgactgccatcatcttcgtggtggccagcagcagctacaacatggtcatccgggaggacaaccagaccaaccgcctgcaggaggctctgaacctcttcaagagcatctggaacaacagatggctgcgcaccatctctgtgatcctgttcctcaacaagcaagatctgctcgctgagaaagtccttgctgggaaatcgaagattgaggactactttccagaatttgctcgctacactactcctgaggatgctactcccgagcccggagaggacccacgcgtgacccgggccaagtacttcattcgagatgagtttctgaggatcagcactgccagtggagatgggcgtcactactgctaccctcatttcacctgcgctgtggacactgagaacatccgccgtgtgttcaacgactgccgtgacatcattcagcgcatgcaccttcgtcagtacgagctgctctaagaagggaacccccaaatttaattaaagccttaagcacaattaattaaaagtgaaacgtaattgtacaagcagttaatcacccaccatagggcatgattaacaaagcaacctttcccttccc

SEQ ID NO: 1092 - DNA, 1746 bp; single-stranded, linear
  immediate source library: GENBANK
  immediate source clone: g183442
gagcctgacttcagcgctcccactctcggccgacacccctcatggccaaccgttacaccatggatctgactgccatctacgagagcctcctgtcgctgagccctgacgtgcccgtgccatccgaccatggagggactgagtccagcccaggctggggctcctcgggaccctggagcctgagcccctccgactccagcccgtctggggtcacctcccgcctgcctggccgctccaccagcctagtggagggccgcagctgtggctgggtgcccccaccccctggcttcgcaccgctggctccccgcctgggccctgagctgtcaccctcacccacttcgcccactgcaacctccaccaccccctcgcgctacaagactgagctatgtcggaccttctcagagagtgggcgctgccgctacggggccaagtgccagtttgcccatggcctgggcgagctgcgccaggccaatcgccaccccaaatacaagacggaactctgtcacaagttctacctccagggccgctgcccctacggctctcgctgccacttcatccacaaccctagcgaagacctggcggccccgggccaccctcctgtgcttcgccagagcatcagcttctccggcctgccctctggccgccggacctcaccaccaccaccaggcctggccggcccttccctgtcctccagctccttctcgccctccagctccccaccaccacctggggaccttccactgtcaccctctgccttctctgctgcccctggcacccccctggctcgaagagaccccaccccagtctgttgcccctcctgccgaagggccactcctatcagcgtctgggggcccttgggtggcctggttcggaccccctctgtacagtccctgggatccgaccctgatgaatatgccagcagcggcagcagcctggggggctctgactctcccgtcttcgaggcgggagtttttgcaccaccccagcccgtggcagccccccggcgactccccatcttcaatcgcatctctgtttctgagtgacaaagtgactgcccggtcagatcagctggatctcagcggggagccacgtctcttgcactgtggtctctgcatggaccccagggctgtggggacttgggggacagtaatcaagtaatccccttttccagaatgcattaacccactcccctgacctcacgctggggcaggtccccaagtgtgcaagctcagtattcatgatggtgggggatggagtgtcttccgaggttcttgggggaaaaaaaattgtagcatatttaagggaggcaatgaaccctctcccccacctcttccctgcccaaatctgtctcctagaatcttatgtgctgtgaataataggccttcactgcccctccagtttttatagacctgaggttccagtgtctcctggtaactggaacctctcctgagggggaatcctggtgctcaaattaccctccaaaagcaagtagccaaagccgttgccaaaccccacccataaatcaatgggccctttatttatgacgactttatttattctaatatgattttatagtatttatatatattgggtcgtctgcttcccttgtatttttcttcctttttttgtaatattgaaaacgacgatataattattataagtagactataatatatttagtaatatatattattaccttaaaagtctatttttgtgttttgggcatttttaaataaacaatctgagtgt

SEQ ID NO: 1093 - DNA, 3170 bp; single-stranded, linear
  immediate source library: GENBANK
  immediate source clone: g183452
cgccgcgggaggcggacgagatgcgagcgcggccgcggccccggccgctctgggtgactgtgctggcgctgggggcgctggcgggcgttggcgtaggagggcccaacatctgtaccacgcgaggtgtgagctcctgccagcagtgcctggctgtgagccccatgtgtgcctggtgctctgatgaggccctgcctctgggctcacctcgctgtgacctgaaggagaatctgctgaaggataactgtgccccagaatccatcgagttcccagtgagtgaggcccgagtactagaggacaggcccctcagcgacaagggctctggagacagctcccaggtcactcaagtcagtccccagaggattgcactccggctccggccagatgattcgaagaatttctccatccaagtgcggcaggtggaggattaccctgtggacatctactacttgatggacctgtcttactccatgaaggatgatctgtggagcatccagaacctgggtaccaagctggccacccagatgcgaaagctcaccagtaacctgcggattggcttcggggcatttgtggacaagcctgtgtcaccatacatgtatatctccccaccagaggccctcgaaaacccctgctatgatatgaagaccacctgcttgcccatgtttggctacaaacacgtgctgacgctaactgaccaggtgacccgcttcaatgaggaagtgaagaagcagagtgtgtcacggaaccgagatgccccagagggtggctttgatgccatcatgcaggctacagtctgtgatgaaaagattggctggaggaatgatgcatcccacttgctggtgtttaccactgatgccaagactcatatagcattggacggaaggctggcaggcattgtccagcctaatgacgggcagtgtcatgttggtagtgacaatcattactctgcctccactaccatggattatccctctttggggctgatgactgagaagctatcccagaaaaacatcaatttgatctttgcagtgactgaaaatgtagtcaatctctatcagaactatagtgagctcatcccagggaccacagttggggttctgtccatggattccagcaatgtcctccagctcattgttgatgcttatgggaaaatccgttctaaagtcgagctggaagtgcgtgacctccctgaagagttgtctctatccttcaatgccacctgcctcaacaatgaggtcatccctggcctcaagtcttgtatgggactcaagattggagacacggtgagcttcagcattgaggccaaggtgcgaggctgtccccaggagaaggagaagtcctttaccataaagcccgtgggcttcaaggacagcctgatcgtccaggtcacctttgattgtgactgtgcctgccaggcccaagctgaacctaatagccatcgctgcaacaatggcaatgggacctttgagtgtggggtatgccgttgtgggcctggctggctgggatcccagtgtgagtgctcagaggaggactatcgcccttcccagcaggacgagtgcagcccccgagagggtcagcccgtctgcagccagcggggcgagtgcctctgtggtcaatgtgtctgccacagcagtgactttggcaagatcacgggcaagtactgcgagtgtgacgacttctcctgtgtccgctacaagggggagatgtgctcaggccatggccagtgcagctgtggggactgcctgtgtgactccgactggaccggctactactgcaactgtaccacgcgtactgacacctgcatgtccagcaatgggctgctgtgcagcggccgcggcaagtgtgaatgtggcagctgtgtctgtatccagccgggctcctatggggacacctgtgagaagtgccccacctgcccagatgcctgcacctttaagaaagaatgtgtggagtgtaagaagtttgaccgggagccctacatgaccgaaaatacctgcaaccgttactgccgtgacgagattgagtcagtgaaagagcttaaggacactggcaaggatgcagtgaattgtacctataagaatgaggatgactgtgtcgtcagattccagtactatgaagattctagtggaaagtccatcctgtatgtggtagaagagccagagtgtcccaagggccctgacatcctggtggtcctgctctcagtgatgggggccattctgctcattggccttgccgccctgctcatctggaaactcctcatcaccatccacgaccgaaaagaattcgctaaatttgaggaagaacgcgccagagcaaaatgggacacagccaacaacccactgtataaagaggccacgtctaccttcaccaatatcacgtaccggggcacttaatgataagcagtcatcctcagatcattatcagcctgtgccaggattgcaggagtccctgccatcatgtttacagaggacagtatttgtggggagggatttcggggctcagagtggggtaggttgggagaatgtcagtatgtggaagtgtgggtctgtgtgtgtgtatgtgggggtctgtgtgtttatgtgtgtgtgttgtgtgtgggagtgtgtaatttaaaattgtgatgtgtcctgataagctgagctccttagcctttgtcccagaatgcctcctgcagggattcttcctgcttagcttgagggtgactatggagctgagcaggtgttcttcattacctcagtgagaagccagctttcctcatcaggccattgtccctgaagagaagggcagggctgaggcctctcattccagaggaagggacaccaagccttggctctaccctgagttcataaatttatggttctcaggcctgactctcagcagctatggtaggaactgctggcttggcagcccgggtcatctgtacctctgcctcctttcccctccctcaggccgaaggaggagtcagggagagctgaactattagagctgcctgtgccttttgccatcccctcaacccagctatggttctctcgcaagggaagtccttgcaagctaattctttgacctgttgggagtgaggatgtctgggccactcaggggtcattcatggcctgggggatgtaccagcatctcccagttcataatcacaacccttcagatttgccttattggcagcg

SEQ ID NO: 1094 - DNA, 2154 bp; single-stranded, linear
  immediate source library: GENBANK
  immediate source clone: g183484
ggaattccgtagtgcgaggccgggcacagccttcctgtgtggttttaccgcccagagagcgtcatggacctggggaaaccaatgaaaagcgtgctggtggtggctctccttgtcattttccaggtatgcctgtgtcaagatgaggtcacggacgattacatcggagacaacaccacagtggactacactttgttcgagtctttgtgctccaagaaggacgtgcggaactttaaagcctggttcctccctatcatgtactccatcatttgtttcgtgggcctactgggcaatgggctggtcgtgttgacctatatctatttcaagaggctcaagaccatgaccgatacctacctgctcaacctggcggtggcagacatcctcttcctcctgacccttcccttctgggcctacagcgcggccaagtcctgggtcttcggtgtccacttttgcaagctcatctttgccatctacaagatgagcttcttcagtggcatgctcctacttctttgcatcagcattgaccgctacgtggccatcgtccaggctgtctcagctcaccgccaccgtgcccgcgtccttctcatcagcaagctgtcctgtgtgggcagcgccatactagccacagtgctctccatcccagagctcctgtacagtgacctccagaggagcagcagtgagcaagcgatgcgatgctctctcatcacagagcatgtggaggcctttatcaccatccaggtggcccagatggtgatcggctttctggtccccctgctggccatgagcttctgttaccttgtcatcatccgcaccctgctccaggcacgcaactttgagcgcaacaaggccatcaaggtgatcatcgctgtggtcgtggtcttcatagtcttccagctgccctacaatggggtggtcctggcccagacggtggccaacttcaacatcaccagtagcacctgtgagctcagtaagcaactcaacatcgcctacgacgtcacctacagcctggcctgcgtccgctgctgcgtcaaccctttcttgtacgccttcatcggcgtcaagttccgcaacgatatcttcaagctcttcaaggacctgggctgcctcagccaggagcagctccggcagtggtcttcctgtcggcacatccggcgctcctccatgagtgtggaggccgagaccaccaccaccttctccccataggcgactcttctgcctggactagagggacctctcccagggtccctggggtggggatagggagcagatgcaatgactcaggacatccccccgccaaaagctgctcaggggaaaaagcagctctcccctcagagtgcaagcccctgctccagaagatagcttcaccccaatcccagctacctcaaccaatgccaaaaaaagacagggctgataagctaacaccagacagacaacactgggaaacagaggctattgtcccctaaaccaaaaactgaaagtgaaagtccagaaactgttcccacctgctggagtgaaggggccaaggagggtgagtgcaaggggcgtgggagtggcctgaagagtcctctgaatgaaccttctggcctcccacagactcaaatgctcagaccagctcttccgaaaaccaggccttatctccaagaccagagatagtggggagacttcttggcttggtgaggaaaagcggacatcagctggtcaaacaaactctctgaacccctccctccatcgttttcttcactgtcctccaagccagcgggaatggcagctgccacgccgccctaaaagcacactcatcccctcacttgccgcgtcgccctcccaggctctcaacaggggagagtgtggtgtttcctgcaggccaggccagctgcctccgcgtgatcaaagccacactctgggctccagagtggggatgacatgcactcagctcttggctccactgggatgggaggagaggacaagggaaatgtcaggggcggggagggtgacagtggccgcccaaggccacgagcttgttctttgttctttgtcacagggactgaaaacctctcctcatgttctgctttcgattcgttaagagagcaacattttacccacacacagataaagttttcccttgaggaaacaacagctttaaaaaaaaaaaaggaattc

SEQ ID NO: 1095 - DNA, 950 bp; single-stranded, linear
  immediate source library: GENBANK
  immediate source clone: g183497
gccgggctgccgtcttctcgccatgggctccgggccgcgcggggcgctgagcttactgctcctgctgctggccccgccgagccgcccggccgcaggttgcccggcgccctgtagctgcgcggggacgctcgtggactgcgggcgccgcgggctgacttgggcctcgctgccgaccgccttccctgtcgacacaaccgagctggtgctgaccggcaacaacctgacggcgctgccgccggggctgctggacgcgctgcccgcgctgcgcaccgcacacctgggcgccaacccctggcgctgcgactgccgccttgtgccgctgcgcgcctggctggccggccgccccgagcgtgcgccctaccgcgacctgcgttgcgtggcgcccccagcgctgcgcggccgcctgctgccctatctggccgaggacgagctgcgcgccgcttgcgctcccggcccgctctgctggggggcgctggcggcgcagcttgcgctgctgggccttgggctgctgcacgcgttgctgctggtgctgctgctgtgccgcctgcggaggctgcgggcccgggcccgcgctcgcgccgcagcccggctgtcgctgaccgacccgctggtggccgagcgagccggaaccgacgagtcctgaggagagaaccggtgcgtcctgaggagagaaccggcgctgggcaacacgggcctgcaaactcgacaggaccctgcccgaggggccctcgcgccaacctggaccggtccccgcctcctccgctgcccaatctctcagacccaccccacctgcaggcccagaccacgtgggacagaactcctgcccaccctaccccgagggaggcgaacccgcacttccaggcttgggaggaccatggggcacaatgcggtccagaccctgctgcgtctcccttccaaactctggtgctgaataaacccttctgatctgg

SEQ ID NO: 1096 - DNA, 2480 bp; single-stranded, linear
  immediate source library: GENBANK
  immediate source clone: g183499
gacgctctgtgccttcggaggtctttctgcctgcctgtcctcatgcctctcctcctcttgctgctcctgctgccaagccccttacacccccaccccatctgtgaggtctccaaagtggccagccacctagaagtgaactgtgacaagaggaatctgacagcgctgcctccagacctgccgaaagacacaaccatcctccacctgagtgagaacctcctgtacaccttctccctggcaaccctgatgccttacactcgcctcactcagctgaacctagataggtgcgagctcaccaagctccaggtcgatgggacgctgccagtgctggggaccctggatctatcccacaatcagctgcaaagcctgcccttgctagggcagacactgcctgctctcaccgtcctggacgtctccttcaaccggctgacctcgctgcctcttggtgccctgcgtggtcttggcgaactccaagagctctacctgaaaggcaatgagctgaagaccctgcccccagggctcctgacgcccacacccaagctggagaagctcagtctggctaacaacaacttgactgagctccccgctgggctcctgaatgggctggagaatctcgacacccttctcctccaagagaactcgctgtatacaataccaaagggcttttttgggtcccacctcctgccttttgcttttctccacgggaacccctggttatgcaactgtgagatcctctattttcgtcgctggctgcaggacaatgctgaaaatgtctacgtatggaagcaaggtgtggacgtcaaggccatgacctctaacgtggccagtgtgcagtgtgacaattcagacaagtttcccgtctacaaatacccaggaaaggggtgccccacccttggtgatgaaggtgacacagacctatatgattactacccagaagaggacactgagggcgataaggtgcgtgccacaaggactgtggtcaagttccccaccaaagcccatacaaccccctggggtctattctactcatggtccactgcttctctagacagccaaatgccctcctccttgcatccaacacaagaatccactaaggagcagaccacattcccacctagatggaccccaaatttcacacttcacatggaatccatcacattctccaaaactccaaaatccactactgaaccaaccccaagcccgaccacctcagagcccgtcccggagcccgccccaaacatgaccaccctggagcccactccaagcccgaccaccccagagcccacctcagagcccgcccccagcccgaccaccccggagcccaccccaatcccgaccatcgccacaagcccgaccatcctggtgtctgccacaagcctgatcactccaaaaagcacatttttaactaccacaaaacccgtatcactcttagaatccaccaaaaaaaccatccctgaacttgatcagccaccaaagctccgtggggtgctccaagggcatttggagagctccagaaatgacccttttctccaccccgacttttgctgcctcctccccctgggcttctatgtcttgggtctcttctggctgctctttgcctctgtggtcctcatcctgctgctgagctgggttgggcatgtgaaaccacaggccctggactctggccaaggtgctgctctgaccacagccacacaaaccacacacctggagctgcagaggggacggcaagtgacagtgccccgggcctggctgctcttccttcgaggttcgcttcccactttccgctccagcctcttcctgtgggtacggcctaatggccgtgtggggcctctagtggcaggaaggaggccctcagctctgagtcagggtcgtggtcaggacctgctgagcacagtgagcattaggtactctggccacagcctctgagggtgggaggtttggggaccttgagagaagagcctgtgggctctcctattggaatctagttgggggttggaggggtaaggaacacagggtgataggggaggggtcttagttcctttttctgtatcagaagccctgtcttcacaacacaggcacacaatttcagtcccagccaaagcagaaggggtaatgacatggacttggcggggggacaagacaaagctcccgatgctgcatggggcgctgccagatctcacggtgaaccattttggcagaatacagcatggttcccacatgcatttatgcacagaagaaaatctggaaagtgatttatcaggatgtgagcactcgttgtgtctggatgttacaaatatgggtggttttattttctttttccctgtttagcattttctagttttcttatcaggatgtgagcactcgttgtgtctggatgttacaaatatgggtggttttattttctttttccctgtttagcattttctagttttccactattattgtatattatctgtataataaaaaataattttagggttggg

SEQ ID NO: 1097 - DNA, 703 bp; single-stranded, linear
  immediate source library: GENBANK
  immediate source clone: g183503
aggtggactgggggctgcccatccccagcccctcccccattcacccggcccatcacaagcgggatcgcagacagatcttcctgccagagcccgagcagccctcgaggcttcaggatccagttctcgtaagctgcgactcggcgccctgtactgtggtgcagtgtgacctgcaggagatggcgcgcgggcagcgggccatggtcacggtgctggccttcctgtggctgcccagcctctaccagaggcctctggatcagtttgtgctgcagtcgcacgcatggttcaacgtgtcctccctcccctatgcggtgcccccgctcagcctgccccgaggggaagctcaggtgtggacacagctgctccgggccttggaggagagggccattccaatctggtgggtgctggtgggtgtgctgggtggcctgctgctgctcaccatcctggtcctggccatgtggaaggtcggcttcttcaagcggaaccggccacccctggaagaagatgatgaagagggggagtgatggtgcagcctacactattctagcaggagggttgggcgtgctacctgcaccgccccttctccaacaagttgcctccaagctttgggttggagctgttccattgggtcctcttggtgtcgtttccctcccaacagagctgggctaccccccctcctgctgcctaataaagagactgagccctg

SEQ ID NO: 1098 - DNA, 2095 bp; single-stranded, linear
  immediate source library: GENBANK
  immediate source clone: g183612
cgcaggcagaccatgtggaccctggtgagctgggtggccttaacagcagggctggtggctggaacgcggtgcccagatggtcagttctgccctgtggcctgctgcctggaccccggaggagccagctacagctgctgccgtccccttctggacaaatggcccacaacactgagcaggcatctgggtggcccctgccaggttgatgcccactgctctgccggccactcctgcatctttaccgtctcagggacttccagttgctgccccttcccagaggccgtggcatgcggggatggccatcactgctgcccacggggcttccactgcagtgcagacgggcgatcctgcttccaaagatcaggtaacaactccgtgggtgccatccagtgccctgatagtcagttcgaatgcccggacttctccacgtgctgtgttatggtcgatggctcctgggggtgctgccccatgccccaggcttcctgctgtgaagacagggtgcactgctgtccgcacggtgccttctgcgacctggttcacacccgctgcatcacacccacgggcacccaccccctggcaaagaagctccctgcccagaggactaacagggcagtggccttgtccagctcggtcatgtgtccggacgcacggtcccggtgccctgatggttctacctgctgtgagctgcccagtgggaagtatggctgctgcccaatgcccaacgccacctgctgctccgatcacctgcactgctgcccccaagacactgtgtgtgacctgatccagagtaagtgcctctccaaggagaacgctaccacggacctcctcactaagctgcctgcgcacacagtgggcgatgtgaaatgtgacatggaggtgagctgcccagatggctatacctgctgccgtctacagtcgggggcctggggctgctgcccttttacccaggctgtgtgctgtgaggaccacatacactgctgtcccgcggggtttacgtgtgacacgcagaagggtacctgtgaacaggggccccaccaggtgccctggatggagaaggccccagctcacctcagcctgccagacccacaagccttgaagagagatgtcccctgtgataatgtcagcagctgtccctcctccgatacctgctgccaactcacgtctggggagtggggctgctgtccaatcccagaggctgtctgctgctcggaccaccagcactgctgcccccagcgatacacgtgtgtagctgaggggcagtgtcagcgaggaagcgagatcgtggctggactggagaagatgcctgcccgccgcggttccttatcccaccccagagacatcggctgtgaccagcacaccagctgcccggtgggcggaacctgctgcccgagccagggtgggagctgggcctgctgccagttgccccatgctgtgtgctgcgaggatcgccagcactgctgcccggctggctacacctgcaacgtgaaggctcgatcctgcgagaaggaagtggtctctgcccagcctgccaccttcctggcccgtagccctcacgtgggtgtgaaggacgtggagtgtggggaaggacacttctgccatgataaccagacctgctgccgagacaaccgacagggctgggcctgctgtccctacgcccagggcgtctgttgtgctgatcggcgccactgctgtcctgctggcttccgctgcgcacgcaggggtaccaagtgtttgcgcagggaggccccgcgctgggacgcccctttgagggacccagccttgagacagctgctgtgagggacagtactgaagactctgcagccctcgggaccccactcggagggtgccctctgctcaggcctccctagcacctccccctaaccaaattctccctggaccccattctgagctccccatcaccatgggaggtggggcctcaatctaaggcccttccctgtcagaagggggttgaggcaaaagcccattacaagctgccatcccctccccgtttcagtggaccctgtggccaggtgcttttccctatccacaggggtgtttgtgtgttgggtgtgctttcaataaagtttgtcactttctt

SEQ ID NO: 1099 - DNA, 1110 bp; single-stranded, linear
  immediate source library: GENBANK
  immediate source clone: g183628
gacagagcccgggccacggagctccttgccagctctcctcctcgcacagccgctcgaaccgcctgctgagccccatggcccgcgccacgctctccgccgcccccagcaatccccggctcctgcgggtggcgctgctgctcctgctcctggtggccgccagccggcgcgcagcaggagcgcccctggccactgaactgcgctgccagtgcttgcagaccctgcagggaattcacctcaagaacatccaaagtgtgaaggtgaagtcccccggaccccactgcgcccaaaccgaagtcatagccacactcaagaatgggcagaaagcttgtctcaaccccgcatcgcccatggttaagaaaatcatcgaaaagatgctgaaaaatggcaaatccaactgaccagaaggaaggaggaagcttattggtggctgttcctgaaggaggccctgccttacaggaacagaagaggaaagagagacacagctgcagaggccacctggcttgcgcctaatgtgtttgagcatacttaggagaagtcttctatttatttatttatttatttatttgtttgttttagaagattctatgttaatattttatgtgtaaaataaggttatgattgaatctacttgcacactctcccattatatttattgtttattttaggtcaaacccaagttagttcaatcctgattcatatttaatttgaagatagaaggtttgcagatattctctagtcatttgttaatatttcttcgtgatgacatatcacatgtcagccactgtgatagaggctgaggaatccaagaaaatggccagtaagatcaatgtgacggcagggaaatgtatgtgtgtctattttgtaactgtaaagatgaatgtcagttgttatttattgaaatgatttcacagtgtgtggtcaacatttctcatgttgaagctttaagaactaaaatgttctaaatatcccttggcattttatgtctttcttgtaagatactgccttgtttaatgttaattatgcagtgtttccctctgtgttagagcagagaggtttcgatatttattgatgttttcacaaagaacaggaaaataaaatatttaaaaatat

SEQ ID NO: 1100 - DNA, 1064 bp; single-stranded, linear
  immediate source library: GENBANK
  immediate source clone: g183632
cacagccgggtcgcaggcacctccccngccagctctcccgcattctgcacagcttcccgacgcgtctgctgagccccatggcccacgccacgctctccgccgcccccagcaatccccggctcctgcgggtggcgctgctgctcctgctcctggtgggcagccggcgcgcagcaggagcgtccgtggtcactgaactgcgctgccagtgcttgcagacactgcagggaattcacctcaagaacatccaaagtgtgaatgtaaggtcccccggaccccactgcgcccaaaccgaagtcatagccacactcaagaatgggaagaaagcttgtctcaaccccgcatcccccatggttcagaaaatcatcgaaaagatactgaacaaggggagcaccaactgacaggagagaagtaagaagcttatcagcgtatcattgacacttcctgcagggtggtccctgcccttaccagagctgaaaatgaaaaagagaacagcagctttctagggacagctggaaagggacttaatgtgtttgactatttcttacgagggttctacttatttatgtatttatttttgaaagcttgtattttaatattttacatgctgttatttaaagatgtgagtgtgtttcatcaaacatagctcagtcctgattatttaattggaatatgatgggttttaaatgtgtcattaaactaatatttagtgggagaccataatgtgtcagccaccttgataaatgacagggtggggaactggagggtngggggattgaaatgcaagcaattagtggatcactgttagggtaagggaatgtatgtacacatctattttttatacttttttttttaaaaaagaatgtcagttgttatttattcaaattatctcacattatgtgttcaacatttttatgctgaagtttcccttagacattttatgtcttgcttgtagggcataatgccttgtttaatgtccattctgcagcgtttctctttcccttggaaaagagaatttatcattactgttacatttgtacaaatgacatgataataaaagttttatg

SEQ ID NO: 1101 - DNA, 909 bp; single-stranded, linear
  immediate source library: GENBANK
  immediate source clone: g183655
gaattcaagtcctaaagcctacagttttgaatactactgaaatgacaagttattccagaccaaaattgaaaaaatggttgacctcacccaggtaatggatgatgaagtattcatggcttttgcatcctatgcaacaattattctttcaaaaatgatgcttatgagtactgcaactgcattctatagattgacaagaaaggtttttgccaatccagaagactgtgtagcatttggcaaaggagaaaatgccaagaagtatcttcgaacagatgacagagtagaacgtgtacgcagagcccacctgaatgaccttgaaaatattattccatttcttggaattggcctcctgtattccttgagtggtcccgacccctctacagccatcctgcacttcagactatttgtcggagcacggatctaccacaccattgcatatttgacaccccttccccagccaaatagagctttgagtttttttgttggatatggagttactctttccatggcttacaggttgctgaaaagtaaattgtacctgtaaagaaaatcatacaactcaacatccagttggctttttaagaattctgtacttccaatttataatgaatactttcttagattttaggtaggaggggagcagaggaattatgaactggggtaaacccattttgaatattagcattgccaatatcctgtattcttgttttacatttggattagaaatttaacatagtaattcttaagtcttttgtctgatttttaaagtactttcttataaatttggatcatgttatgatttgtaacattcacacaacacctcacttttgaatctataaaagaattgcacgtatgagaaacctatatttcaatactgctgaaacagacatgaaataaagaatttaaagaatg

SEQ ID NO: 1102 - DNA, 1158 bp; single-stranded, linear
  immediate source library: GENBANK
  immediate source clone: g183661
cttgaagatcggcgggcgcagcggggccgagggggcgggtctggcgctaggtccagcccctgcgtgccgggaaccccagaggaggtcgcagttcagcccagctgaggcctgtctgcagaatcgacaccaaccagcatcatgtccatgacactggggtactgggacatccgcgggctggcccacgccatccgcctgctcctggaatacacagactcaagctacgaggaaaagaagtatacgatgggggacgctcctgactatgacagaagccagtggctgaatgaaaaattcaagctgggcctggactttcccaatgtggggagacagaagaggagaagattcgtgtggacattttggagaaccaggctatggacgtctccaatcagctggccagagtctgctacagccctgactttgagaaactgaagccagaatacttggaggaacttcctacaatgatgcagcacttctcacagttcctggggaagaggccatggtttgttggagacaagatcacctttgtagatttcctcgcctatgatgtccttgacctccaccgtatatttgagcccaactgcttggacgccttcccaaatctgaaggacttcatctcccgctttgagggcttggagaagatctctgcctacatgaagtccagccgcttcctcccaaaacctctgtacacaagggtggctgtctggggcaacaagtaatgccttgaaggccaggaggtgggagtgaggagcccatactcagcctgctgcccaggctgtgcagcgcagctggactctgcatcccagcacctgcctcctcgttcctttctcctgtttattcccatctttacccccaagactttattgggcctcttcacttcccctaaacccctgtcccatgcaggccctttgaagcctcagctacccactttccttcatgaacatccccctcccaacactacccttccctgcactaaagccagcctgaccttccttcctgttagtggttgtatctgctttgaaggcctacctggcccctcgcctgtggagctcagccctgagctgtccccgtgttgcatgacagcattgactggtttacaggccctgctcctgcagcatggcccctgccttaggcctacctgatcaaaataaagcctcagccaca

SEQ ID NO: 1103 - DNA, 929 bp; single-stranded, linear
  immediate source library: GENBANK
  immediate source clone: g183666
ggttgtccagccacaaaggtgacagcatttaacaaagcttagagaaacctccaggagactgctaccatggcagagaagcccaagctccactactccaatatacggggcagaatggagtccatccggtggctcctggctgcagctggagtagagtttgaagagaaatttataaaatctgcagaagatttggacaagttaagaaatgatggatatttgatgttccagcaagtgccaatggttgagattgatgggatgaagctggtgcagaccagagccattctcaactacattgccagcaaatacaacctctatgggaaagacataaaggagaaagccctgattgatatgtatatagaaggtatagcagatttgggtgaaatgatccttcttctgccctttactcaacctgaggaacaagatgccaagcttgccttgatccaagagaaaacaaaaaatcgctacttccctgcctttgaaaaagtcttaaagagccacggacaagactaccttgttggcaacaagctgagccgggctgacattcacctggtggaacttctctactacgtggaagagcttgactctagccttatttccagcttccctctgctgaaggccctgaaaaccagaatcagtaacctgcccacagtgaagaagtttctacagcctggcagcccaaggaagcctcccatggatgagaaatctttagaagaatcaaggaagattttcaggttttaataaaccagccatagaggtcaagaacatgcaagaccagtattctaaagttttgcaacaattaagtgctttacctaagtgttgattgtgcctgttgtgaagctaatgaactctttcaaattatatgctaattaaataatacaactcctattcacccacttagttaaaattgatttcttctcattaggatctgatgt

SEQ ID NO: 1104 - DNA, 3915 bp; single-stranded, linear
  immediate source library: GENBANK
  immediate source clone: g183684
gtggggtggggtggggctgggggcttgtcgccctttcaggctccaccctttgcggagattataaatagtcatgatcccagcgagacccagagatgcctgtaatggtgagactttggatccttcctgaggacgtggagaaaactttctgctgagaaggacattttgaaggttttgttggctgaaaaagctgtttctggaatcacccctagatctttcttgaagacttgaattagattacagcgatggggacacagaaggtcaccccagctctgatatttgccatcacagttgctacaatcggctctttccaatttggctacaacactggggtcatcaatgctcctgagaagatcataaaggaatttatcaataaaactttgacggacaagggaaatgccccaccctctgaggtgctgctcacgtctctctggtccttgtctgtggccatattttccgtcgggggtatgatcggctccttttccgtcggactcttcgtcaaccgctttggcaggcgcaattcaatgctgattgtcaacctgttggctgtcactggtggctgctttatgggactgtgtaaagtagctaagtcggttgaaatgctgatcctgggtcgcttggttattggcctcttctgcggactctgcacaggttttgtgcccatgtacattggagagatctcgcctactgccctgcggggtgcctttggcactctcaaccagctgggcatcgttgttggaattctggtggcccagatctttggtctggaattcatccttgggtctgaagagctatggccgctgctactgggttttaccatccttcctgctatcctacaaagtgcagcccttccattttgccctgaaagtcccagatttttgctcattaacagaaaagaagaggagaatgctaagcagatcctccagcggttgtggggcacccaggatgtatcccaagacatccaggagatgaaagatgagagtgcaaggatgtcacaagaaaagcaagtcaccgtgctagagctctttagagtgtccagctaccgacagcccatcatcatttccattgtgctccagctctctcagcagctctctgggatcaatgctgtgttctattactcaacaggaatcttcaaggatgcaggtgttcaagagcccatctatgccaccatcggcgcgggtgtggttaatactatcttcactgtagtttctctatttctggtggaaagggcaggaagaaggactctgcatatgataggccttggagggatggctttttgttccacgctcatgactgtttctttgttattaaaggataactataatgggatgagctttgtctgtattggggctatcttggtctttgtagccttctttgaaattggaccaggccccattccctggtttattgtggccgaactcttcagccagggcccccgcccagctgcgatggcagtggccggctgctccaactggacctccaacttcctagtcggattgctcttcccctccgctgctcactatttaggagcctacgtttttattatcttcaccggcttcctcattaccttcttggcttttaccttcttcaaagtccctgagacccgtggcaggacttttgaggatatcacacgggcctttgaagggcaggcacacggtgcagatagatctggaaaggacggcgtcatggagatgaacagcatcgagcctgctaaggagaccaccaccaatgtctaagtcgtgcctccttccacctccctcccggcatgggaaagccacctctccctcaacaagggagagacctcatcaggatgaacccaggacgcttctgaatgctgctacttaattcctttctcatcccacgcactccatgagcaccccaaggctgcggtttgttggatcttcaatggctttttaaattttatttcctggacatcctcttctgcttaggagagaccgagtgaacctaccttcatttcaggagggattggccgcttggcacatgacaactttgccagcttttcctcccttgggttctgatattgccgcactaggggatataggagaggaaaagtaaggtgcagttcccccaacctcagacttaccaggaagcagatacatatgagtgtggaagccggagggtgtttatgtaagagcaccttcctcacttccatacagctctacgtggcaaattaacttgagttttatttattttatcctctggtttaattacataatttttttttttttactttaagtttcaggatacatgtgccgaatgtgcaggtttgttacataggtatatatatgccatgatggaaatatttatttttttaagcgtaattttgccaaataataaaaacagaaggaaattgagattagagggaggtgtttaaagagaggttatagagtagaagatttgatgctggagaggttaaggtgcaataagaatttagggagaaatgttgttcattattggagggtaaatgatgtggtgcctgaggtctgtacgttacctcttaacaatttctgtccttcagatggaaactctttaacttctcgtaaaagtcatatacctatataataaagctactgatttccttggagcttttttctttaagataatagtttacatgtagtagtacttgaaatctaggattattaactaatatgggcattgtagttaatgatggttgatgggttctaattttggatggagtccagggaagagaaagtgatttctagaaagcctgttcccctcactggatgaaataactccttcttgtagtagtctcattacttttgaagtaatcccgccacctatctcgtgggagagccatccaaataagaaacctaaaataattggttcttggtagagattcattatttttccactttgttctttaggagattttaggtgttgattttctgttgtattttaactcatacctttaaaggaattccccaaagaatgtttatagcaaacttggaatttgtaacctcagctctgggagaggatttttttctgagcgattattatctaaagtgtgttgttgctttaggctcacggcacgcttgcgtatgtctgttaccatgtcactgtggtcctatgccgaatgccctcaggggacttgaatctttccaataaaccaggtttagacagtatgagtcaatgtgcagtgtagcccacacttgagaggatgaatgtatgtgcactgtcactttgctctgggtggaagtacgttattgttgacttattttctctgtgtttgttcctacagcccctttttcatatgttgctcagtctccctttcccttcttggtgcttacacatctcagaccctttagccaaacccttgtcagtgacagtattttggttcttagttctcactgttccctctgctcctggagcctttgaataaaaatgcacgtagctgaggccggatgcggtggctcacgcctgtaatcccagcactttgggaggcctaggcgggcggtcaggggttcgagaccagtctggccaacatcgtgaaaccctgtctctactaaaaatgcaaaaattagccgggcgtggtggcgggcgcctgtaatcccagctacttgggaagctgaggcgggagaatcatgtgaacccgggacgcaggggttgcagtgagcggagatcgcatcattgcactctagcctgggccacagggcgagactccgtctcaaaaaaaaaaaaatgcacatagctatcgagtgtgctttagcttgaaaaggtgaccttgcaacttcatgtcaactttctggctcctcaaacagtaggttggcagtaaggcagggtcccatttctcactgagaagattgtgaatatttccatatggattttctattgttactctggttctttgttttaaaataaaaattctgaatgtacacg

SEQ ID NO: 1105 - DNA, 2015 bp; single-stranded, linear
  immediate source library: GENBANK
  immediate source clone: g183911
cggaggcacggaagatgaggaagatgatcaggaggatgatgaaggtgaagagggagatgaagacgatgacgacgatggctctgaggggacctcaggggctgccgagctgggggggcgctcaagctgcgaggatccgggctgcccgcgagacgaggagcgggcgccaggatggggtcgatgaagtccaagttcctccaggtcggaggcaatacattctcaaaaactgaaaccagcgccagcccacactgtcctgtgtacgtgccggatcccacatccaccatcaagccggggcctaatagccacaacagcaacacaccaggaatcagggaggcaggctctgaggacatcatcgtggttgccctgtatgattacgaggccattcaccacgaagacctcagcttccagaagggggaccagatggtggtcctagaggaatccggggagtggtggaaggctcgatccctggccacccggaaggagggctacatcccaagcaactatgtcgcccgcgttgactctctggagacagaggagtggtttttcaagggcatcagccggaaggacgcagagcgccaactgctggctcccggcaacatgctgggctccttcatgatccgggatagcgagaccactaaaggaagctactctttgtccgtgcgagactacgaccctcggcagggagataccgtgaaacattacaagatccggaccctggacaacgggggcttctacatatccccccgaagcaccttcagcactctgcaggagctggtggaccactacaagaaggggaacgacgggctctgccagaaactgtcggtgccctgcatgtcttccaagccccagaagccttgggagaaagatgcctgggagatccctcgggaatccctcaagctggagaagaaacttggagctgggcagtttggggaagtctggatggccacctacaacaagcacaccaaggtggcagtgaagacgatgaagccagggagcatgtcggtggaggccttcctggcagaggccaacgtgatgaaaactctgcagcatgacaagctggtcaaacttcatgcggtggtcaccaaggagcccatctacatcatcacggagttcatggccaaaggaagcttgctggactttctgaaaagtgatgagggcagcaagcagccattgccaaaactcattgacttctcagcccagattgcagaaggcatggccttcatcgagcagaggaactacatccaccgagacctccgagctgccaacatcttggtctctgcatccctggtgtgtaagattgctgactttggcctggcccgggtcattgaggacaacgagtacacggctcgggaaggggccaagttccccatcaagtggacagctcctgaagccatcaactttggctccttcaccatcaagtcagacgtctggtcctttggtatcctgctgatggagatcgtcacctacggccggatcccttacccagggatgtcaaaccctgaagtgatccgagctctggagcgtggataccggatgcctcgcccagagaactgcccagaggagctctacaacatcatgatgcgctgctggaaaaaccgtccggaggagcggccgaccttcgaatacatccagagtgtgctggatgacttctacacggccacagagagccagtaccaacagcagccatgatagggaggaccagggcagggcagggggtgcccaggtggtggctcgaaggtggctccagcaccatccgccagggcccacacccccttcctactcccagacacccaccctcgcttcagccacagtttcctcatctgtccagtgggtaggttggactggaaaatctctttttgactcttgcaatccacaatctgacattctcaggaagcccccaagttgatatttctatttcctggaatggttggattttagttacagctgtgatttggaagggaaactttcaaaatagtgaaatgaatatttaaataaaagatataaatgcaagtcttacg

SEQ ID NO: 1106 - DNA, 2090 bp; single-stranded, linear
  immediate source library: GENBANK
  immediate source clone: g183915
cttagtccctgagctctctgcctgcccagactagctgcacctcctcattccctgcgcccccttcctctccggaagcccccaggatggtgaggtggtttcaccgagacctcagtgggctggatgcagagaccctgctcaagggccgaggtgtccacggtagcttcctggctcggcccagtcgcaagaaccagggtgacttctcgctctccgtcagggtgggggatcaggtgacccatattcggatccagaactcaggggatttctatgacctgtatggaggggagaagtttgcgactctgacagagctggtggagtactacactcagcagcagggtgtcctgcaggaccgcgacggcaccatcatccacctcaagtacccgctgaactgctccgatcccactagtgagaggtggtaccatggccacatgtctggcgggcaggcagagacgctgctgcaggccaagggcgagccctggacgtttcttgtgcgtgagagcctcagccagcctggagacttcgtgctttctgtgctcagtgaccagcccaaggctggcccaggctccccgctcagggtcacccacatcaaggtcatgtgcgagggtggacgctacacagtgggtggtttggagaccttcgacagcctcacggacctggtggagcatttcaagaagacggggattgaggaggcctcaggcgcctttgtctacctgcggcagccgtactatgccacgagggtgaatgcggctgacattgagaaccgagtgttggaactgaacaagaagcaggagtccgaggatacagccaaggctggcttctgggaggagtttgagagtttgcagaagcaggaggtgaagaacttgcaccagcgtctggaagggcagcggccagagaacaagggcaagaaccgctacaagaacattctcccctttgaccacagccgagtgatcctgcagggacgggacagtaacatccccgggtccgactacatcaatgccaactacatcaagaaccagctgctaggccctgatgagaacgctaagacctacatcgccagccagggctgtctggaggccacggtcaatgacttctggcagatggcgtggcaggagaacagccgtgtcatcgtcatgaccacccgagaggtggagaaaggccggaacaaatgcgtcccatactggcccgaggtgggcatgcagcgtgcttatgggccctactctgtgaccaactgcggggagcatgacacaaccgaatacaaactccgtaccttacaggtctccccgctggacaatggagacctgattcgggagatctggcattaccagtacctgagctggcccgaccatggggtccccagtgagcctgggggtgtcctcagcttcctggaccagatcaaccagcggcaggaaagtctgcctcacgcagggcccatcatcgtgcactgcagcgccggcatcggccgcacaggcaccatcattgtcatcgacatgctcatggagaacatctccaccaagggcctggactgtgacattgacatccagaagaccatccagatggtgcgggcgcagcgctcgggcatggtgcagacggaggcgcagtacaagttcatctacgtggccatcgcccagttcattgaaaccactaagaagaagctggaggtcctgcagtcgcagaagggccaggagtcggagtacgggaacatcacctatcccccagccatgaagaatgcccatgccaaggcctcccgcacctcgtccaaacacaaggaggatgtgtatgagaacctgcacactaagaacaagagggaggagaaagtgaagaagcagcggtcagcagacaaggagaagagcaagggttccctcaagaggaagtgagcggtgctgtcctcaggtggccatgcctcagccctgaccctgtggaaggatttcgcgatggacagactcacaacctgaacctaggagatgtcgtattcttttgtaatttaaatggctgtatcccccccctaacctctccctgaccctgtatatagcccagccaggcccagcagggccacccttctcctcttgtaaataaagccctgggatcactgtgan

SEQ ID NO: 1107 - DNA, 574 bp; single-stranded, linear
  immediate source library: GENBANK
  immediate source clone: g183944
atggtgcacctgactcctgtggagaagtcgcngttactgcntntggggcaaggtgaacgtggatgaagttggtggtgaggccctgggcaggctgctggtggtctacccttggacccagaggttctttgagtcctttggggatctgtccactcctgatgcagttatgggcaaccctaaggtgaaggctcatggcaagaaagtgctcggtgcctttagtgatggcctggctcacctggacaacctcaagggcacctttgccacactgagtgagctgcactgtgacaagctgcacgtggatcctgagaacttcaggctcctgggcaacgtgctggtctgtgtgctggcccatcactttggcaaagaattcaccccaccagtgcaggcagcctatcagaaagtggtggctggtgtggctaatgccctggcccacaagtatcactaagctcgctttcttgctgtccaatttctattaaaggttcctttgttccctaagtccaactactaaactgggggatattatgaagggccttgagcatctggattctgcctaataaaaaacatttattttcattgc

SEQ ID NO: 1108 - DNA, 871 bp; single-stranded, linear
  immediate source library: GENBANK
  immediate source clone: g184081
gctgtcagaaaacaataacagcagtgagaatgaacgcacttaaataaaagctcgtgtctagagtctctccttttataggcctttcatgcaaataaagaattcaaaatatccagctctgattgggcaatgtgttagtgacgcatacatgtaaaatagccttcaccttatttcctttctaattggttggctcgtcaaagaacaattttaaccaatcaaattgcgcctttcacaattctaccgatgactataactagcttcttattcctccatcgagcccattctttttctttattcagtggattgttagttcttctgctgttaggaagccactatgtctggacgtggaaagcaaggcggcaaagctcgggcaaaagctaaaacgcgttcttccagggccggtcttcagtttccagttggccgtgtgcaccgcctcctccgcaaaggcaactactccgaacgagtcggggccggcgctccagtgtacctggcagcggtgctggaatatctgacggccgagatcttagagctagctggcaacgcggctcgcgacaataagaagacccgcatcatcccgcgccacctgcagctagccatccgcaacgacgaggagctaaataagcttctaggtcgcgtgaccatcgcgcagggcggtgtcctgcccaacatccaggccgtattgctgcctaagaagacggagagccaccataaggccaagggcaagtgaaatgattactagtcaaatccgtcagtgatcccgagtcccagaaaccaaaggctcttttcagagccacccaccttttctgtaaagtgctggaatacacatacgatgcctgaaatctcaatgttcactgtcctaatttttaacgaactt

SEQ ID NO: 1109 - DNA, 4428 bp; single-stranded, linear
  immediate source library: GENBANK
  immediate source clone: g184227
gggcggggtgagggggggcagcagctcgccactctgattggtcacctctgctccaaaactggcttcaaaattccacggactccgcccccagtggcccccagccctatcctgacttgcaattggctgaactttcagggggcggggctcacccggtccggtccagttaaaagggtgggagcgtccgggggcccatctctctcgggtggagtcttctgacagctggtgcgcctgcccgggaacatcctcctggactcaatcatggcttgtgtgagtgtggggacccccccccaaggtccaggggatagggcaggaactgatggccagaggagagctgggcagatcgggagcagattctagccccagctgtgtggcctggaaccagtgccttctcttttctggacctcagtggccacatctgtaaaatgggggtgggcgccatggtccctcaaggccttctctgcattgataattgtctggattcctccagggtctgaaagcacagttatttctgcccagggttgacattctgcagctctctgagaagtgagcgtgggaagggtgtggccaactgggggacacccaggccactatccctttccccctcctccaccccaaagaacctcctgtcacctccaccctgcagctgtcccggtcaccaggccagggcagagttaccctctactccagagaacgctgaaaagttgccaggacccgagacaagctgcccaagatgggcccttctaggtcgggggtggagggtggttgtgtccaggctggtggcggggggggccggggaaattcccttccaccacccccaagctgggaggttggggtggcagggaggtgagaatcttcctcgggctccagggaaagggttcaagtttctggcagaagaaaccactcaaaccagttaactcttgcccacccactcggggtgccagggaacagcagtgcccagcagtttgctcaatcttgttaaccctgagccagcccagccacagcccgactgcagggctactctccctaatgcagagaggccgtgtttttcagggtctcctctctagcccctgggcctctttgcagagaggggcttgaaggagaatagtggagtcgcccgcccctagccacttcctctccagcagaggggccgccccctccattcagtgtgacggtgggccaagtgtcggcccctccccagcctgatcctctccatctgcgatgggacagagcaccccatctcccaagtcactcttgagtccaaaattccaagccaatctgcaaaatcttctagagcctgtcttctagaaccttcacgttacagactgaagccaaccccggtgggaatagggactttcccaggaccacatagacaatcggaggctggaaattacagctcaatcctttccccaggcttccccttggcttggtcagaggatgccgggcgggaacaaccccactcccacccccagccacccccggacacttcgagcagtggaggccttgtcctctaaccggctgggccggggcttgtctgtgcagggtctggtcgccagcaacctgaatctcaaacctggagagtgccttcgagtgcgaggcgaggtggctcctgacgctaagaggtgagaagtgaagtcggggtggtgggcggcagggacgggcttggtccagcagggagggcgtggccggccaagcccacatctcctccctggccgggagcgggttaacggccagccgccgatgctgcgttttctgggtgactcacttcccccgcagggtctgggcgcccccaccgttgccgccccctcccccgctccctccctgctgtagcctcttaaactaaaccagctgcagcctcgtcatctgtaataccttgactcccccgcccccacccctttccggtctgggcgggacctgtcgctggggagggcggggagaggagtggggcgggcgtcaccgcgccttccccctgagtccctccttcctgcgttctggtcattcattcattcactggctcagtccggtccttcttccttcacttctcattcactcagacggctgccttattttctcggcagttaggtgaccttggaccagtcaaccaacctcacctagcctcagtttgttagaaaaacaaggggggaggtggttgtgtggaggaagtgagatgcgcgtggcgcagtgacagtgaggaggatgaggatcagctgatattgttaagagccgcacacttctcatgcactaatttcatttcaaccaaaccctcagaggcaggtattgctattatcaccactcaacaaatgtatttattattttatttatttatttattattttattattttatttatttattttttgagacacagtctcaccctgtcgcccaggctggagtgcaatggcgtgatctcggctcaccacaacctccgcctcccgggttcaaacgattctccggcttcagcctcctgagtagccgggattacaggggcccaccacaacgcccagctaatttatgtacttttagtagagacggggtttcaccatgttggccaggctggtctcgaactcctgacctcatgatctgcccgctcgcctcggcctcccaaagtgctggggttacaggcatgagccaccgtgcccgggagtattattattattatttgttaattcgccccataattactaagcatctttttctggtgtgccccacttgtgctgggcaccgggaatacagagatgtacaagacaggacgggaggtcaccatctggagggagtcactgaccttgaccaaacgggctaggatgctaatgacttcaagaatcaagcgagccctcctgtgcagcccccattgtacagatgagcaaacaggggaagaggggcaggagcaggtggcatggccagagctagaatccaggtttcttgtctctgttagtgagttcttccagcaaggtgcgttcatgggatactgagtgacagattagtcggtcagtggggctggagctggccgaggtggcctcatgcccacccgttaccccccagcttcgtgctgaacctgggcaaagacagcaacaacctgtgcctgcacttcaaccctcgcttcaacgcccacggcgacgccaacaccatcgtgtgcaacagcaaggacggcggggcctgggggaccgagcagcgggaggctgtctttcccttccagcctggaagtgttgcagaggtgggctgcagaccggaaccggggaccagggacaggggctgggtgggctggggcggggctgggttagtgactagagaccttggccctgcctgctctttcccctccccttccctcccttcctgtgtgatggccagtgtctgcccctctttgaacctcagtggttgattacaataaaacgaaggggaaaaaaaaaggctgggcttggtggctcatgcctgtaatcccagcactttgggaggccgaggcgggcggatcacctgaggtcgggagttcgagaccagcctgaccaacatggagaaaccctgtctcgactaaaaatacaaaaaattagctaggcgtgatggcgcatgcctgtaatcccagctactcaggaggctgaggcaggagaattggttgaacccgggaggcggaggttgcagtgagccgagattgcaccactgcactccagcctggccaacaagagcaaaactctgtctcaaaaaaaaaaaaaaaaattagccagcgtgctggctcatgcctgtaatcctggcactttgggagaccaaagtgggtggatcacctgaggtcaggagttcgagaccagcctgaccaacatggtgaaaccccgtctctatataaatacaaaaattagctgggcgtggtggcacacaactgtagtcctagctactcaggaggctgagacaggagaatcacttgaacctgggaggcggaggttgcagtgagccgagattatgccactgtactccagcctgggcgacagaggagactccatctcaaaaaaaaaaaaaaatctatcataggattagagtaaaaagaaagaaaaaatattataaatgtacctccgcaggctcagccacaaactggggctgtgtcagggccacatgaggaacgggttctggaagggcccatggcatgtgggcccggctcactgctctcctctacccccaggtgtgcatcaccttcgaccaggccaacctgaccgtcaagctgccagatggatacgaattcaagttccccaaccgcctcaacctggaggccatcaactacatggcagctgacggtgacttcaagatcaaatgtgtggcctttgactgaaatcagccagcccatggcccccaataaaggcagctgcctctgctccctctgaaccagcctcgtgtgtgtgcttgtgcgtgtgtgtgtatgtgtgtgcatgtgtttgtgtgtgtgagaggggtccc

SEQ ID NO: 1110 - DNA, 1740 bp; single-stranded, linear
  immediate source library: GENBANK
  immediate source clone: g184262
atgccctcctgggccctcttcatggtcacctcctgcctcctcctggcccctcaaaacctggcccaagtcagcagccaagatgtctccttgctggcatcagactcagagcccctgaagtgtttctcccgaacatttgaggacctcacttgcttctgggatgaggaagaggcagcgcccagtgggacataccagctgctgtatgcctacccgcgggagaagccccgtgcttgccccctgagttcccagagcatgccccactttggaacccgatacgtgtgccagtttccagaccaggaggaagtgcgtctcttctttccgctgcacctctgggtgaagaatgtgttcctaaaccagactcggactcagcgagtcctctttgtggacagtgtaggcctgccggctccccccagtatcatcaaggccatgggtgggagccagccaggggaacttcagatcagctgggaggagccagctccagaaatcagtgatttcctgaggtacgaactccgctatggccccagagatcccaagaactccactggtcccacggtcatacagctgattgccacagaaacctgctgccctgctctgcagaggcctcactcagcctctgctctggaccagtctccatgtgctcagcccacaatgccctggcaagatggaccaaagcagacctccccaagtagagaagcttcagctctgacagcagagggtggaagctgcctcatctcaggactccagcctggcaactcctactggctgcagctgcgcagcgaacctgatgggatctccctcggtggctcctggggatcctggtccctccctgtgactgtggacctgcctggagatgcagtggcacttggactgcaatgctttaccttggacctgaagaatgttacctgtcaatggcagcaacaggaccatgctagctcccaaggcttcttctaccacagcagggcacggtgctgccccagagacaggtaccccatctgggagaactgcgaagaggaagagaaaacaaatccaggactacagaccccacagttctctcgctgccacttcaagtcacgaaatgacagcattattcacatccttgtggaggtgaccacagccccgggtactgttcacagctacctgggctcccctttctggatccaccaggctgtgcgcctccccaccccaaacttgcactggagggagatctccagtgggcatctggaattggagtggcagcacccatcgtcctgggcagcccaagagacctgttatcaactccgatacacaggagaaggccatcaggactggaaggtgctggagccgcctctcggggcccgaggagggaccctggagctgcgcccgcgatctcgctaccgtttacagctgcgcgccaggctcaacggccccacctaccaaggtccctggagctcgtggtcggacccaactagggtggagaccgccaccgagaccgcctggatctccttggtgaccgctctgcatctagtgctgggcctcagcgccgtcctgggcctgctgctgctgaggtggcagtttcctgcacactacaggtaccgcccccgccaggcaggagactggcggtggaccaggtggagccgaacgtgtaaacaggcattcttggttcgctctgtgaccccagatctccgtccaccgcccgtgcgcacctacggcttcgcacttcctgcacgtcacctctgggactcgccgcggctccttacactctaa

SEQ ID NO: 1111 - DNA, 2156 bp; single-stranded, linear
  immediate source library: GENBANK
  immediate source clone: g184402
cgggcccgttgcaagatggcggcggccatgctgggccccggggctgtgtgtgcgcagcgggcggcggcgcggcccggaaggctggcgcggcgacggcgttagcccggccctcggcccctctttgcggccgctccctccgcctattccctccttgctcgagatggatctgcccgtgggccccggcgcggcggggcccagcaacgtcccggccttcctgaccaagctgtggaccctcgtgagcgacccggacaccgacgcgctcatctgctggagcccgagcgggaacagcttccacgtgttcgaccagggccagtttgccaaggaggtgctgcccaagtacttcaagcacaacaacatggccagcttcgtgcggcagctcaacatgtatggcttccggaaagtggtccacatcgagcagggcggcctggtcaagccagagagagacgacacggagttccagcacccatgcttcctgcgtggccaggagcagctccttgagaacatcaagaggaaagtgaccagtgtgtccaccctgaagagtgaagacataaagatccgccaggacagcgtcaccaagctgctgacggacgtgcagctgatgaaggggaagcaggagtgcatggactccaagctcctggccatgaagcatgagaatgaggctctgtggcgggaggtggccagccttcggcagaagcatgcccagcaacagaaagtcgtcaacaagctcattcagttcctgatctcactggtgcagtcaaaccggatcctgggggtgaagagaaagatccccctgatgctgaacgacagtggctcagcacattccatgcccaagtatagccggcagttctccctggagcacgtccacggctcgggcccctactcggccccctccccagcctacagcagctccagcctctacgcccctgatgctgtggccagctctggacccatcatctccgacatcaccgagctggctcctgccagccccatggcctcccccggcgggagcatagacgagaggcccctatccagcagccccctggtgcgtgtcaaggaggagccccccagcccgcctcagagcccccgggtagaggaggcgagtcccgggcgcccatcttccgtggacaccctcttgtccccgaccgccctcattgactccatcctgcgggagagtgaacctgcccccgcctccgtcacagccctcacggacgccaggggccacacggacaccgagggccggcctccctcccccccgcccacctccacccctgaaaagtgcctcagcgtagcctgcctggacaagaatgagctcagtgaccacttggatgctatggactccaacctggataacctgcagaccatgctgagcagccacggcttcagcgtggacaccagtgccctgctggacctgttcagcccctcggtgaccgtgcccgacatgagcctgcctgaccttgacagcagcctggccagtatccaagagctcctgtctccccaggagccccccaggcctcccgaggcagagaacagcagcccggattcagggaagcagctggtgcactacacagcgcagccgctgttcctgctggaccccggctccgtggacaccgggagcaacgacctgccggtgctgtttgagctgggagagggctcctacttctccgaaggggacggcttcgccgaggaccccaccatctccctgctgacaggctcggagcctcccaaagccaaggaccccactgtctcctagaggccccggaggagctgggccagccgcccacccccacccccagtgcagggctggtcttggggaggcagggcagcctcgcggtcttgggcactggtgggtcggccgccatagccccagtaggacaaacgggctcgggtctgggcagcacctctggtcaggagggtcaccctggcctgccagtctgccttcccccaaccccgtgtcctgtggtttggttggggcttcacagccacacctggactgaccctgcaggttgttcatagtcagaattgtattttggatttttacacaactgtcccgttccccgctccacagagatacacagatatatacacacagtggatggacggacaagacaggcagagatctataaacagacaggctctaaaaaaaaaaaaaaaaaaaa

SEQ ID NO: 1112 - DNA, 968 bp; single-stranded, linear
  immediate source library: GENBANK
  immediate source clone: g184413
cccgggcgggcgggcgggaggctctcgactgggcgggaaggtgcgggaaggttcgcggcggcggggtcggggaggtgcaaaaggatgaaaagcccgtggacggagctgagcagatccggccgggctggcggcagagaaaccgcagggagagcctcactgctgagcgcccctcgacgcgggcggcagcagcctccgtggcctccagcatccgacaagaagcttcagccatgcaggccccacgggagctcgcggtgggcatcgacctaggcaccacctactcgtgcgtgggcgtctttcagcagggacgcgtggagatcctagccaacgaccaaggcaaccgcaccacgcccagctacgtggccttcaccgacaccgagcggctggtcggggacgcggccaagaaccaggcggccctgaacccccacaacaccgtgttcgatgccaagcggctgatcgggcgcaagttcgcggacaccacggtgcagtcggatatgaagcactggcccttcaaggtggtgagcggaggcggcaagcccaaggtgcgcgtatgctaccgcggggaggacaagacgttctaccccgaggagatctcgtccatggtgctgaccaagatgaaggagacggccgaggcgtaccttggccagcccgtgaagcacgcagtgatcaccgtgcccacctatttcagtaactcgcagcgccaagccaccaaggacgcgggggccatcgcggggctcaaggtgctgccgatcatcaatgaggccacggcagcagccatcgcctatgggctggaccggcggcgcgcgggaaagcgcaacgtgctcatttttgacttgggtgggggcaccttcgatgtgtcggttctcaccattgacgccggtgtctttgaggtgaaagccactgctggagatacccacttgggaggagaggacttcgacaaccggctcgtgaaccacttcatggaagaattc

SEQ ID NO: 1113 - DNA, 1947 bp; single-stranded, linear
  immediate source library: GENBANK
  immediate source clone: g184508
agcagctctgtaatgcgcttgtggtttcagatgtgggcggcctgtgtgaacctgtcgtgcaaagctcacgtcaccaactgctgcagttatctcctgaatcaggctgagggtctttgctgtgcacccagagatagttgggtgacaaatcacctccaggttggggatgcctcagacttgtgatgggactgggcagatgcatctgggaaggctggaccttggagagtgaggccctgaggcgagacatgggcacctggctcctggcctgcatctgcatctgcacctgtgtctgcttgggagtctctgtcacaggggaaggacaagggccaaggtctagaaccttcacctgcctcaccaacaacattctcaggatcgattgccactggtctgccccagagctgggacagggctccagcccctggctcctcttcaccagcaaccaggctcctggcggcacacataagtgcatcttgcggggcagtgagtgcaccgtcgtgctgccacctgaggcagtgctcgtgccatctgacaatttcaccatcactttccaccactgcatgtctgggagggagcaggtcagcctggtggacccggagtacctgccccggagacacgttaagctggacccgccctctgacttgcagagcaacatcagttctggccactgcatcctgacctggagcatcagtcctgccttggagccaatgaccacacttctcagctatgagctggccttcaagaagcaggaagaggcctgggagcaggcccagcacagggatcacattgtcggggtgacctggcttatacttgaagcctttgagctggaccctggctttatccatgaggccaggctgcgtgtccagatggccacactggaggatgatgtggtagaggaggagcgttatacaggccagtggagtgagtggagccagcctgtgtgcttccaggctccccagagacaaggccctctgatcccaccctgggggtggccaggcaacacccttgttgctgtgtccatctttctcctgctgactggcccgacctacctcctgttcaagctgtcgcccagggtgaagagaatcttctaccagaacgtgccctctccagcgatgttcttccagcccctctacagtgtacacaatgggaacttccagacttggatgggggcccacagggccggtgtgctgttgagccaggactgtgctggcaccccacagggagccttggagccctgcgtccaggaggccactgcactgctcacttgtggcccagcgcgtccttggaaatctgtggccctggaggaggaacaggagggccctgggaccaggctcccggggaacctgagctcagaggatgtgctgccagcagggtgtacggagtggagggtacagacgcttgcctatctgccacaggaggactgggcccccacgtccctgactaggccggctcccccagactcagagggcagcaggagcagcagcagcagcagcagcagcagcaacaacaacaactactgtgccttgggctgctatgggggatggcacctctcagccctcccaggaaacacacagagctctgggcccatcccagccctggcctgtggcctttcttgtgaccatcagggcctggagacccagcaaggagttgcctgggtgctggctggtcactgccagaggcctgggctgcatgaggacctccagggcatgttgctcccttctgtcctcagcaaggctcggtcctggacattctaggtccctgactcgccagatgcatcatgtccattttgggaaaatggactgaagtttctggagcccttgtctgagactgaacctcctgagaaggggcccctagcagcggtcagaggtcctgtctggatggaggctggaggctcccccctcaacccctctgctcagtgcctgtggggagcagcctctaccctcagcatcctgg

SEQ ID NO: 1114 - DNA, 3110 bp; single-stranded, linear
  immediate source library: GENBANK
  immediate source clone: g184524
cgcgccgccgctgagggaggcgccccaccatgccgcgggccccggcgccgctgtacgcctgcctcctggggctctgcgcgctcctgccccggctcgcaggtctcaacatatgcactagtggaagtgccacctcatgtgaagaatgtctgctaatccacccaaaatgtgcctggtgctccaaagaggacttcggaagcccacggtccatcacctctcggtgtgatctgagggcaaaccttgtcaaaaatggctgtggaggtgagatagagagcccagccagcagcttccatgtcctgaggagcctgcccctcagcagcaagggttcgggctctgcaggctgggacgtcattcagatgacaccacaggagattgccgtgaacctccggcccggtgacaagaccaccttccagctacaggttcgccaggtggaggactatcctgtggacctgtactacctgatggacctctccctgtccatgaaggatgacttggacaatatccggagcctgggcaccaaactcgcggaggagatgaggaagctcaccagcaacttccggttgggatttgggtcttttgttgataaggacatctctcctttctcctacgcggcaccgaggtaccagaccaatccgtgcattggttacaagttgtttccaaattgcgtcccctcctttgggttccgccatctgctgcctctcacagacagagtggacagcttcaatgaggaagttcggaaacagagggtgtcccggaaccgagatgcccctgaggggggctttgatgcagtactccaggcagccgtctgcaaggagaagattggctggcgaaaggatgcactgcatttgctggtgttcacaacagatgatgtgccccacatcgcattggatggaaaattgggaggcctggtgcagccacacgatggccagtgccacctgaacgaggccaacgagtacactgcatccaaccagatggactatccatcccttgccttgcttggagagaaattggcagagaacaacatcaacctcatctttgcagtgacaaaaaaccattatatgctgtacaagaattttacagccctgatacctggaacaacggtggagattttagatggagactccaaaaatattattcaactgattattaatgcatacaatagtatccggtctaaagtggagttgtcagtctgggatcagcctgaggatcttaatctcttctttactgctacctgccaagatggggtatcctatcctggtcagaggaagtgtgagggtctgaagattggggacacggcatcttttgaagtatcattggaggcccgaagctgtcccagcagacacacggagcatgtgtttgccctgcggccggtgggattccgggacagcctggaggtgggggtcacctacaactgcacgtgcggctgcagcgtggggctggaacccaacagcgccaggtgcaacgggagcgggacctatgtctgcggcctgtgtgagtgcagccccggctacctgggcaccaggtgcgagtgccaggatggggagaaccagagcgtgtaccagaacctgtgccgggaggcagagggcaagccactgtgcagcgggcgtggggactgcagctgcaaccagtgctcctgcttcgagagcgagtttggcaagatctatgggcctttctgtgagtgcgacaacttctcctgtgccaggaacaagggagtcctctgctcaggccatggcgagtgtcactgcggggaatgcaagtgccatgcaggttacatcggggacaactgtaactgctcgacagacatcagcacatgccggggcagagatggccagatctgcagcgagcgtgggcactgtctctgtgggcagtgccaatgcacggagccgggggcctttggggagatgtgtgagaagtgccccacctgcccggatgcatgcagcaccaagagagattgcgtcgagtgcctgctgctccactctgggaaacctgacaaccagacctgccacagcctatgcagggatgaggtgatcacatgggtggacaccatcgtgaaagatgaccaggaggctgtgctatgtttctacaaaaccgccaaggactgcgtcatgatgttcacctatgtggagctccccagtgggaagtccaacctgaccgtcctcagggagccagagtgtggaaacacccccaacgccatgaccatcctcctggctgtggtcggtagcatcctccttgttgggcttgcactcctggctatctggaagctgcttgtcaccatccacgaccggagggagtttgcaaagtttcagagcgagcgatccagggcccgctatgaaatggcttcaaatccattatacagaaagcctatctccacgcacactgtggacttcaccttcaacaaatcctacaatggcactgtggactgatgtttccttctccgaggggctggagcggggatctgatgaaaaggatcagactgaaacgccttgcacggctgctcggcttgatcacagctccctaggtaggcaccacagagaagaccttctagtgagcctgggccaggagcccacagtgcctgtacaggaaggtgcctggccatgtcacctggctgctaggccagagccatgccaggctgcgtccctccgagcttgggataaagcaaggggaccttggcgctctcagctttccctgccacatccagcttgttgtcccaatgaaatactgagatgctgggctgtctctcccttccaggaatgctgggcccccagcctggccagacaagaagactgtcaggaagggtcggagtctgtaaaaccagcatacagtttggcttttttcacattgatcatttttatatgaaataaaaagatcctgcatttatggtgtagttctgagtcctgagacttttctgcgtgatggctatgccttgcacacaggtgttggtgatggggctgttgagatgcctgttgaaggtacatcgtttgcaaatgtgagtttcctctcctgtccgtgtttgtttagtacttttataatgaaaagaaacaagattgtttgggattggaagtaaagattaaaaccaaaagaatttgtgtttgtctgataaaaaaaaaaaaaaa

SEQ ID NO: 1115 - DNA, 3003 bp; single-stranded, linear
  immediate source library: GENBANK
  immediate source clone: g184532
gctataaggatcacgcgccccagtcgacgctgagctcctctgctactcagagttgcaacctcagcctcgctatggctcccagcagcccccggcccgcgctgcccgcactcctggtcctgctcggggctctgttcccaggacctggcaatgcccagacatctgtgtccccctcaaaagtcatcctgccccggggaggctccgtgctggtgacatgcagcacctcctgtgaccagcccaagttgttgggcatagagaccccgttgcctaaaaaggagttgctcctgcctgggaacaaccggaaggtgtatgaactgagcaatgtgcaagaagatagccaaccaatgtgctattcaaactgccctgatgggcagtcaacagctaaaaccttcctcaccgtgtactggactccagaacgggtggaactggcacccctcccctcttggcagccagtgggcaagaaccttaccctacgctgccaggtggagggtggggcaccccgggccaacctcaccgtggtgctgctccgtggggagaaggagctgaaacgggagccagctgtgggggagcccgctgaggtcacgaccacggtgctggtgaggagagatcaccatggagccaatttctcgtgccgcactgaactggacctgcggccccaagggctggagctgtttgagaacacctcggccccctaccagctccagacctttgtcctgccagcgactcccccacaacttgtcagcccccgggtcctagaggtggacacgcaggggaccgtggtctgttccctggacgggctgttcccagtctcggaggcccaggtccacctggcactgggggaccagaggttgaaccccacagtcacctatggcaacgactccttctcggccaaggcctcagtcagtgtgaccgcagaggacgagggcacccagcggctgacgtgtgcagtaatactggggaaccagagccaggagacactgcagacagtgaccatctacagctttccggcgcccaacgtgattctgacgaagccagaggtctcagaagggaccgaggtgacagtgaagtgtgaggcccaccctagagccaaggtgacgctgaatggggttccagcccagccactgggcccgagggcccagctcctgctgaaggccaccccagaggacaacgggcgcagcttctcctgctctgcaaccctggaggtggccggccagcttatacacaagaaccagacccgggagcttcgtgtcctgtatggcccccgactggacgagagggattgtccgggaaactggacgtggccagaaaattcccagcagactccaatgtgccaggcttgggggaacccattgcccgagctcaagtgtctaaaggatggcactttcccactgcccatcggggaatcagtgactgtcactcgagatcttgagggcacctacctctgtcgggccaggagcactcaaggggaggtcacccgcaaggtgaccgtgaatgtgctctccccccggtatgagattgtcatcatcactgtggtagcagccgcagtcataatgggcactgcaggcctcagcacgtacctctataaccgccagcggaagatcaagaaatacagactacaacaggcccaaaaagggacccccatgaaaccgaacacacaagccacgcctccctgaacctatcccgggacagggcctcttcctcggccttcccatattggtggcagtggtgccacactgaacagagtggaagacatatgccatgcagctacacctaccggccctgggacgccggaggacagggcattgtcctcagtcagatacaacagcatttggggccatggtacctgcacacctaaaacactaggccacgcatctgatctgtagtcacatgactaagccaagaggaaggagcaagactcaagacatgattgatggatgttaaagtctagcctgatgagaggggaagtggtgggggagacatagccccaccatgaggacatacaactgggaaatactgaaacttgctgcctattgggtatgctgaggccccacagacttacagaagaagtggccctccatagacatgtgtagcatcaaaacacaaaggcccacacttcctgacggatgccagcttgggcactgctgtctactgaccccaacccttgatgatatgtatttattcatttgttattttaccagctatttattgagtgtcttttatgtaggctaaatgaacataggtctctggcctcacggagctcccagtccatgtcacattcaaggtcaccaggtacagttgtacaggttgtacactgcaggagagtgcctggcaaaaagatcaaatggggctgggacttctcattggccaacctgcctttccccagaaggagtgatttttctatcggcacaaaagcactatatggactggtaatggttcacaggttcagagattacccagtgaggccttattcctcccttccccccaaaactgacacctttgttagccacctccccacccacatacatttctgccagtgttcacaatgacactcagcggtcatgtctggacatgagtgcccagggaatatgcccaagctatgccttgtcctcttgtcctgtttgcatttcactgggagcttgcactattgcagctccagtttcctgcagtgatcagggtcctgcaagcagtggggaagggggccaaggtattggaggactccctcccagctttggaagcctcatccgcgtgtgtgtgtgtgtgtgtatgtgtagacaagctctcgctctgtcacccaggctggagtgcagtggtgcaatcatggttcactgcagtcttgaccttttgggctcaagtgatcctcccacctcagcctcctgagtagctgggaccataggctcacaacaccacacctggcaaatttgattttttttttttttttcagagacggggtctcgcaacattgcccagacttcctttgtgttagttaataaagctttctcaactgcc

SEQ ID NO: 1116 - DNA, 838 bp; single-stranded, linear
  immediate source library: GENBANK
  immediate source clone: g184622
gagtctaactgcaacctttcgaagcctttgctctggcacaacaggtagtaggcgacactggtcgtgttgttgacatgaccaacaagtgtctcctccaaattgctctcctgttgtgcttctccacgacagctctttccatgagctacaacttgcttggattcctacaaagaagcagcaattgtcagtgtcagaagctcctgtggcaattgaatgggaggcttgaatactgcctcaaggacaggaggaactttgacatccctgaggagattaagcagctgcagcagttccagaaggaggacgccgcagtgaccatctatgagatgctccagaacatctttgctattttcagacaagattcatcgagcactggctggaatgagactattgttgagaacctcctggctaatgtctatcatcagagaaaccatctgaagacagtcctggaagaaaaactggagaaagaagatttcaccaggggaaaacgcatgagcagtctgcacctgaaaagatattatgggaggattctgcattacctgaaggccaaggaggacagtcactgtgcctggaccatagtcagagtggaaatcctaaggaacttttacgtcattaacagacttacaggttacctccgaaactgaagatctcctagcctgtgcctctgggacgggacaattgcttcaagcattcttcaaccagcagatgctgtttaagtgactgatggcgaatgtactgcatatgaaaggacactagaagattttgaaatttttattaaattatgaggtatttttatttatttaaattttattttggaaaataaattatttttggtgcaaaagtc

SEQ ID NO: 1117 - DNA, 736 bp; single-stranded, linear
  immediate source library: GENBANK
  immediate source clone: g184636
ttcaaggttacccatctcaagtagcctagcaatattggcaacatcccaatggccctgtccttttctttactgatggccgtgctggtgctcagctacaaatccatctgttctctgggctgtgatctgcctcagacccacagcctgggtaataggagggccttgatactcctggcacaaatgggaagaatctctcctttctcctgcctgaaggacagacatgactttggattcccccaggaggagtttgatggcaaccagttccagaaggctcaagccatctctgtcctccatgagatgatccagcagaccttcaatctcttcagcacaaaggactcatctgctacttgggaacagagcctcctagaaaaattttccactgaacttaaccagcagctgaatgacctggaagcctgcgtgatacaggaggttggggtggaagagactcccctgatgaatgtggactccatcctggctgtgaagaaatacttccaaagaatcactctttatctgacagagaagaaatacagcccttgtgcctgggaggttgtcagagcagaaatcatgagatccttctctttatcaaaaatttttcaagaaagattaaggaggaaggaatgaaacctgtttcaacatggaaatgatctgtattgactaatacaccagtccacacttctatgacttctgccatttcaaagactcatttctcctataaccaccgcatgagttgactcaaaac

SEQ ID NO: 1118 - DNA, 2755 bp; single-stranded, linear
  immediate source library: GENBANK
  immediate source clone: g184645
ttaggacggggcgatggcggctgagaggagctgcgcgtgcgcgaacatgtaactggtgggatctgcggcggctcccagatgatggtcgtcctcctgggcgcgacgaccctagtgctcgtcgccgtgggcccatgggtgttgtccgcagccgcaggtggaaaaaatctaaaatctcctcaaaaagtagaggtcgacatcatagatgacaactttatcctgaggtggaacaggagcgatgagtctgtcgggaatgtgactttttcattcgattatcaaaaaactgggatggataattggataaaattgtctgggtgtcagaatattactagtaccaaatgcaacttttcttcactcaagctgaatgtttatgaagaaattaaattgcgtataagagcagaaaaagaaaacacttcttcatggtatgaggttgactcatttacaccatttcgcaaagctcagattggtcctccagaagtacatttagaagctgaagataaggcaatagtgatacacatctctcctggaacaaaagatagtgttatgtgggctttggatggtttaagctttacatatagcttacttatctggaaaaactcttcaggtgtagaagaaaggattgaaaatatttattccagacataaaatttataaactctcaccagagactacttattgtctaaaagttaaagcagcactacttacgtcatggaaaattggtgtctatagtccagtacattgtataaagaccacagttgaaaatgaactacctccaccagaaaatatagaagtcagtgtccaaaatcagaactatgttcttaaatgggattatacatatgcaaacatgacctttcaagttcagtggctccacgcctttttaaaaaggaatcctggaaaccatttgtataaatggaaacaaatacctgactgtgaaaatgtcaaaactacccagtgtgtctttcctcaaaacgttttccaaaaaggaatttaccttctccgcgtacaagcatctgatggaaataacacatctttttggtctgaagagataaagtttgatactgaaatacaagctttcctacttcctccagtctttaacattagatcccttagtgattcattccatatctatatcggtgctccaaaacagtctggaaacacgcctgtgatccaggattatccactgatttatgaaattattttttgggaaaacacttcaaatgctgagagaaaaattatcgagaaaaaaactgatgttacagttcctaatttgaaaccactgactgtatattgtgtgaaagccagagcacacaccatggatgaaaagctgaataaaagcagtgtttttagtgacgctgtatgtgagaaaacaaaaccaggaaatacctctaaaatttggcttatagttggaatttgtattgcattatttgctctcccgtttgtcatttatgctgcgaaagtcttcttgagatgcatcaattatgtcttctttccatcacttaaaccttcttccagtatagatgagtatttctctgaacagccattgaagaatcttctgctttcaacttctgaggaacaaatcgaaaaatgtttcataattgaaaatataagcacaattgctacagtagaagaaactaatcaaactgatgaagatcataaaaaatacagttcccaaactagccaagattcaggaaattattctaatgaagatgaaagcgaaagtaaaacaagtgaagaactacagcaggactttgtatgaccagaaatgaactgtgtcaagtataaggtttttcagcaggagttacactgggagcctgaggtcctcaccttcctctcagtaactacagagaggacgtttcctgtttagggaaagaaaaaacatcttcagatcataggtcctaaaaatacgggcaagctcttaactatttaaaaatgaaattacaggcccgggcacggtggctcacacctgtaatcccagcactttgggaggctgaggcaggcagatcatgaggtcaagagatcgagaccagcctggccaacgtggtgaaaccccatctctactaaaaatacaaaaattagccgggtagtaggtaggcgcgcgcctgttgtcttagctactcaggaggctgaggcaggagaatcgcttgaaaacaggaggtggaggttgcagtgagccgagatcacgccactgcactccagcctggtgacagcgtgagactctttaaaaaaagaaattaaaagagttgagacaaacgtttcctacattcttttccatgtgtaaaatcatgaaaaagcctgtcaccggacttgcattggatgagatgagtcagaccaaaacagtggccacccgtcttcctcctgtgagcctaagtgcagccgtgctagctgcgcaccgtggctaaggatgacgtctgtgttcctgtccatcactgatgctgctggctactgcatgtgccacacctgtctgttcgccattcctaacattctgtttcattcttcctcgggagatatttcaaacatttggtcttttcttttaacactgagggtaggcccttaggaaatttatttaggaaagtctgaacacgttatcacttggttttctggaaagtagcttaccctagaaaacagctgcaaatgccagaaagatgatccctaaaaatgttgagggacttctgttcattcatcccgagaacattggcttccacatcacagtatctacccttacatggtttaggattaaagccaggcaatcttttactatg

SEQ ID NO: 1119 - DNA, 2064 bp; single-stranded, linear
  immediate source library: GENBANK
  immediate source clone: g184650
gaattccgcaggcgctcggggttggagccagcgaccgtcggtagcagcatggctctcctctttctcctaccccttgtcatgcagggtgtgagcagggctgagatgggcaccgcggatctggggccgtcctcagtgcctacaccaactaatgttacaattgaatcctataacatgaaccctatcgtatattgggagtaccagatcatgccacaggtccctgtttttaccgtagaggtaaagaactatggtgttaagaattcagaatggattgatgcctgcatcaatatttctcatcattattgtaatatttctgatcatgttggtgatccatcaaattctctttgggtcagagttaaagccagggttggacaaaaagaatctgcctatgcaaagtcagaagaatttgctgtatgccgagatggaaaaattggaccacctaaactggatatcagaaaggaggagaagcaaatcatgattgacatatttcacccttcagtttttgtaaatggagacgagcaggaagtcgattatgatcccgaaactacctgttacattagggtgtacaatgtgtatgtgagaatgaacggaagtgagatccagtataaaatactcacgcagaaggaagatgattgtgacgagattcagtgccagttagcgattccagtatcctcactgaattctcagtactgtgtttcagcagaaggagtcttacatgtgtggggtgttacaactgaaaagtcaaaagaagtttgtattaccattttcaatagcagtataaaaggttctctttggattccagttgttgctgctttactactctttctagtgcttagcctggtattcatctgtttttatattaagaaaattaatccattgaaggaaaaaagcataatattacccaagtccttgatctctgtggtaagaagtgctactttagagacaaaacctgaatcaaaatatgtatcactcatcacgtcataccagccattttccttagaaaaggaggtggtctgtgaagagccgttgtctccagcaacagttccaggcatgcataccgaagacaatccaggaaaagtggaacatacagaagaactttctagtataacagaagtggtgactactgaagaaaatattcctgacgtggtcccgggcagccatctgactccaatagagagagagagttcttcacctttaagtagtaaccagtctgaacctggcagcatcgctttaaactcgtatcactccagaaattgttctgagagtgatcactccagaaatggttttgatactgattccagctgtctggaatcacatagctccttatctgactcagaatttcccccaaataataaaggtgaaataaaaacagaaggacaagagctcataaccgtaataaaagcccccacctcctttggttatgataaaccacatgtgctagtggatctacttgtggatgatagcggtaaagagtccttgattggttatagaccaacagaagattccaaagaattttcatgagatcagctaagttgcaccaactttgaagtctgattttcctggacagttttctgctttaatttcatgaaaagattatgatctcagaaattgtatcttagttggtatcaaccaaatggagtgacttagtgtacatgaaagcgtaaagaggatgtgtggcattttcacttttggcttgtaaagtacagacttttttttttttttaaacaaaaaaagcattgtaacttatgaacctttacatccagataggttaccagtaacggaacatatccagtactcctggttcctaggtgagcaggtgatgccccagggacctttgtagccacttcactttttttcttttctctgccttggtatagcatatgtgttttgtaagtttatgcatacagtaattttaagtaatttcagaagaaattctcgaagcttttcaaaattggacttaaaatctaattcaaactaatagaattaatggaatatgtaaatagaaacgtgtatattttttatgaaacattacagttagagatttttaaataaagaattttaaaactc

SEQ ID NO: 1120 - DNA, 1599 bp; single-stranded, linear
  immediate source library: GENBANK
  immediate source clone: g185361
tctaaagaagcccctgggagcacagctcatcaccatggactggacctggaggttcctctttgtggtggcagcagctacaggtgtccagtcccagatgcaggtggtgcagtctggggctgaagtaaagaagcctgggtcctcggtgacggtctcctgcaaggcatctggaggcaccttcagcaactatgctatcagctgggtgcgacaggcccctggacaagggcttgagtggatgggagggatcatccctctttttggtacaccaacctactcacagaacttccagggcagagtcacgattaccgcggacaaatccaccagcacagcccacatggagctgatcagcctgagatctgaggacacggccgtgtattactgtgcgacagatcgctacaggcaggcaaattttgaccgggcccgggttggctggttcgacccctggggccagggcaccctggtcaccgtctcctcagcctccaccaagggcccatcggtcttccccctggcaccctcctccaagagcacctctgggggcacagcggccctgggctgcctggtcaaggactacttccccgaaccggtgacggtgtcgtggaactcaggcgccctgaccagcggcgtgcacaccttcccggctgtcctacagtcctcaggactctactccctcagcagcgtggtgaccgtgccctccagcagcttgggcacccagacctacatctgcaacgtgaatcacaagcccagcaacaccaaggtggacaagaaagttgagcccaaatcttgtgacaaaactcacacatgcccaccgtgcccagcacctgaactcctggggggaccgtcagtcttcctcttccccccaaaacccaaggacaccctcatgatctcccggacccctgaggtcacatgcgtggtggtggacgtgagccacgaagaccctgaggtcaagttcaactggtacgtggacggcgtggaggtgcataatgccaagacaaagccgcgggaggagcagtacaacagcacgtaccgtgtggtcagcgtcctcaccgtcctgcaccaggactggctgaatggcaaggagtacaagtgcaaggtctccaacaaagccctcccagcccccatcgagaaaaccatctccaaagccaaagggcagccccgagaaccacaggtgtacaccctgcccccatcccgggatgagctgaccaagaaccaggtcagcctgacctgcctggtcaaaggcttctatcccagcgacatcgccgtggagtgggagagcaatgggcagccggagaacaactacaagaccacgcctcccgtgctggactccgacggctccttcttcctctacagcaagctcaccgtggacaagagcaggtggcagcaggggaacgtcttctcatgctccgtgatgcatgaggctctgcacaaccactacacgcagaagagcctctccctgtctccgggtaaatgagtgcgacggccggcaagcccccgctccccgggctctcgcggtcgcacgaggatgcttggcacgtaccccgtgtacatacttcccgggcgcccagcatggaaataaagcacccagcgctgccctgggcccctgcg

SEQ ID NO: 1121 - DNA, 1032 bp; single-stranded, linear
  immediate source library: GENBANK
  immediate source clone: g186264
ggagggtgggcagcactcgctttattgtccagcattccacatggatagtcgccacacctttgcccctgctgcgatgaccctgtcgccacttctgctgttcctgccaccgctgctgctgctgctggacgtccccacggcggcggtgcaggcgtcccctctgcaagcgttagacttctttgggaatgggccaccagttaactacaagacaggcaatctatacctgcgggggcccctgaagaagtccaatgcaccgcttgtcaatgtgaccctctactatgaagcactgtgcggtggctgccgagccttcctgatccgggagctcttcccaacatggctgttggtcatggagatcctcaatgtcacgtcggtgccctacggaaacgcacaggaacaaaatgtcagtggcaggtgggagttcaagtgccagcttggagaagaggagtgcaaattcaacaaggtggaggcctgcgtgttggatgaacttgacatggagctagccttcctgaccatgtctggcatggcatggaagagtttgaggacatggagagaagtctgccactatgcctgcagctctacgccccagggctgtcgccagaactatcatggagtgtgcaatgggggaccgcggcatgcagctcatgcacgccaacgcccagcggacagatgctctccagccaccgcacgagtatgtgccctgggtcaccgtcaatgggaaacccttggaagatcagacccagctccttacccttgtctgccagttgtaccagggcaagaagccggatgtctgcccttcctcaaccagctccctccggagtgtttgcttcgagtgttggccggtgggctgcggagagctcatggaaggcgagtgggaactcggctgcctgcctttttttctgatccagaccctcggcacctgctacttaccaactggaaaattttatgcatcccatgaagcccagatacacaaaattccacccctagatcaagaatcctgctccactaagaatggtgctaaagtaaaactagtttaat

SEQ ID NO: 1122 - DNA, 1601 bp; single-stranded, linear
  immediate source library: GENBANK
  immediate source clone: g186270_1
aaaccacaagacagacttgcaaaagaaggcatgcacagctcagcactgctctgttgcctggtcctcctgactggggtgagggccagcccaggccagggcacccagtctgagaacagctgcacccacttcccaggcaacctgcctaacatgcttcgagatctccgagatgccttcagcagagtgaagactttctttcaaatgaaggatcagctggacaacttgttgttaaaggagtccttgctggaggactttaagggttacctgggttgccaagccttgtctgagatgatccagttttacctggaggaggtgatgccccaagctgagaaccaagacccagacatcaaggcgcatgtgaactccctgggggagaacctgaagaccctcaggctgaggctacggcgctgtcatcgatttcttccctgtgaaaacaagagcaaggccgtggagcaggtgaagaatgcctttaataagctccaagagaaaggcatctacaaagccatgagtgagtttgacatcttcatcaactacatagaagcctacatgacaatgaagatacgaaactgagacatcagggtggcgactctatagactctaggacataaattagaggtctccaaaatcggatctggggctctgggatagctgacccagccccttgagaaaccttattgtacctctcttatagaatatttattacctctgatacctcaacccccatttctatttatttactgagcttctctgtgaacgatttagaaagaagcccaatattataatttttttcaatatttattattttcacctgtttttaagctgtttccatagggtgacacactatggtatttgagtgttttaagataaattataagttacataagggaggaaaaaaaatgttctttggggagccaacagaagcttccattccaagcctgaccacgctttctagctgttgagctgttttccctgacctccctctaatttatcttgtctctgggcttggggcttcctaactgctacaaatactcttaggaagagaaaccagggagcccctttgatgattaattcaccttccagtgtctcggagggattcccctaacctcattccccaaccacttcattcttgaaagctgtggccagcttgttatttataacaacctaaatttggttctaggccgggcgcggtggctcacgcctgtaatcccagcactttgggaggctgaggcgggtggatcacttgaggtcaggagttcctaaccagcctggtcaacatggtgaaaccccgtctctactaaaaatacaaaaattagccgggcatggtggcgcgcacctgtaatcccagctacttgggaggctgaggcaagagaattgcttgaacccaggagatggaagttgcagtgagctgatatcatgcccctgtactccagcctgggtgacagagcaagactctgtctcaaaaaaataaaaataaaaataaatttggttctaatagaactcagttttaactagaatttattcaattcctctgggaatgttacattgtttgtctgtcttcatagcagattttaattttgaataaataaatgtatcttattcacatc

SEQ ID NO: 1123 - DNA, 488 bp; single-stranded, linear
  immediate source library: GENBANK
  immediate source clone: g186270_2
tggagcgaaggttagtggtcactctgcagtgcctggtgctgctttacctggcacctgagtgtggaggtacagaccaatgtgacaattttccccaaatgttgagggacctaagagatgccttcagtcgtgttaaaacctttttccagacaaaggacgaggtagataaccttttgctcaaggagtctctgctagaggactttaagggctaccttggatgccaggccctgtcagaaatgatccaattctacctggaggaagtcatgccacaggctgaaaaccaggaccctgaagccaaagaccatgtcaattctttgggtgaaaatctaaagaccctacggctccgcctgcgcaggtgccacaggttcctgccgtgtgagaacaagagtaaagctgtggaacagataaaaaatgcctttaacaagctgcaggaaaaaggaatttacaaagccatgagtgaatttgacatttttattaactacatagaagca

SEQ ID NO: 1124 - DNA, 2430 bp; single-stranded, linear
  immediate source library: GENBANK
  immediate source clone: g186279
catttcattggcgtttgagtcagcaaagaagtcaagatggccaaagttccagacatgtttgaagacctgaagaactgttacagtgaaaatgaagaagacagttcctccattgatcatctgtctctgaatcagaaatccttctatcatgtaagctatggcccactccatgaaggctgcatggatcaatctgtgtctctgagtatctctgaaacctctaaaacatccaagcttaccttcaaggagagcatggtggtagtagcaaccaacgggaaggttctgaagaagagacggttgagtttaagccaatccatcactgatgatgacctggaggccatcgccaatgactcagaggaagaaatcatcaagcctaggtcagcaccttttagcttcctgagcaatgtgaaatacaactttatgaggatcatcaaatacgaattcatcctgaatgacgccctcaatcaaagtataattcgagccaatgatcagtacctcacggctgctgcattacataatctggatgaagcagtgaaatttgacatgggtgcttataagtcatcaaaggatgatgctaaaattaccgtgattctaagaatctcaaaaactcaattgtatgtgactgcccaagatgaagaccaaccagtgctgctgaaggagatgcctgagatacccaaaaccatcacaggtagtgagaccaacctcctcttcttctgggaaactcacggcactaagaactatttcacatcagttgcccatccaaacttgtttattgccacaaagcaagactactgggtgtgcttggcaggggggccaccctctatcactgactttcagatactggaaaaccaggcgtaggtctggagtctcacttgtctcacttgtgcagtgttgacagttcatatgtaccatgtacatgaagaagctaaatcctttactgttagtcatttgctgagcatgtactgacccttgtaattctaaatgaatgtttacactctttgtaagagtggaaccaacactaacatataatgttgttatttaaagaacaccctatattttgcatagtaccaatcattttaattattattcttcataacaattttaggaggaccagagctactgactatggctaccaaaaagactctacccatattacagatgggcaaattaaggcataagaaaactaagaaatatgcacaatagcagttgaaacaagaagccacagacctaggatttcatgatttcatttcaactgtttgccttctacttttaagttgctgatgaactcttaatcaaatagcataagtttctgggacctcagttttatcattttcaaaatggagggaataatacctaagccttcctgccgcaacagttttttatgctaatcagggaggtcattttggtaaaatacttcttgaagccgagcctcaagatgaaggcaaagcacgaaatgttattttttaattattatttatatatgtatttataaatatatttaagataattataatatactatatttatgggaaccccttcatcctctgagtgtgaccaggcatcctccacaatagcagacagtgttttctgggataagtaagtttgatttcattaatacagggcattttggtccaagttgtgcttatcccatagccaggaaactctgcattctagtacttgggagacctgtaatcatataataaatgtacattaattaccttgagccagtaattggtccgatctttgactcttttgccattaaacttacctgggcattcttgtttcattcaattccacctgcaatcaagtcctacaagctaaaattagatgaactcaactttgacaaccatgagaccactgttatcaaagttgagttcatctaattttagcttgtagagacgggatttcaccatcttggccgtgctggtctcgaacttctgacctcgtgatccacccgcctcggcctcccaaagtgctgggattacaggcgtgagccatcgcgcccggcctggagtttctactgtgcaccaggcactacctttacatgtattgttttatttaatcctcagtcagccgtgtttggtaggtgcagttagtatatttccattttcatctgcgcaaacagattcaggaactttgtaatttacataaggtcacattcatcctaattcacaaaatcaagatttcacacctattcctttttctttccagtgcctgtgctttttctctcataccaaggagaagtaataagcctaacgttttaaacctcacaaaagtacatacagaaaagtaaatagcctaattttgcaactaatacaaatggcgctgtacttctttggtgatggtagatttataatttttgaagtatggtagattcaaatgaaccactgaaaaggcatttagtttcttgtcccaaataaaaaaaaaaaaaaaaaa

SEQ ID NO: 1125 - DNA, 4910 bp; single-stranded, linear
  immediate source library: GENBANK
  immediate source clone: g186289
tagacgcaccctctgaagatggtgactccctcctgagaagctggaccccttggtaaaagacaaggccttctccaagaagaatatgaaagtgttactcagacttatttgtttcatagctctactgatttcttctctggaggctgataaatgcaaggaacgtgaagaaaaaataattttagtgtcatctgcaaatgaaattgatgttcgtccctgtcctcttaacccaaatgaacacaaaggcactataacttggtataaagatgacagcaagacacctgtatctacagaacaagcctccaggattcatcaacacaaagagaaactttggtttgttcctgctaaggtggaggattcaggacattactattgcgtggtaagaaattcatcttactgcctcagaattaaaataagtgcaaaatttgtggagaatgagcctaacttatgttataatgcacaagccatatttaagcagaaactacccgttgcaggagacggaggacttgtgtgcccttatatggagttttttaaaaatgaaaataatgagttacctaaattacagtggtataaggattgcaaacctctacttcttgacaatatacactttagtggagtcaaagataggctcatcgtgatgaatgtggctgaaaagcatagagggaactatacttgtcatgcatcctacacatacttgggcaagcaatatcctattacccgggtaatagaatttattactctagaggaaaacaaacccacaaggcctgtgattgtgagcccagctaatgagacaatggaagtagacttgggatcccagatacaattgatctgtaatgtcaccggccagttgagtgacattgcttactggaagtggaatgggtcagtaattgatgaagatgacccagtgctaggggaagactattacagtgtggaaaatcctgcaaacaaaagaaggagtaccctcatcacagtgcttaatatatcggaaattgaaagtagattttataaacatccatttacctgttttgccaagaatacacatggtatagatgcagcatatatccagttaatatatccagtcactaatttccagaagcacatgattggtatatgtgtcacgttgacagtcataattgtgtgttctgttttcatctataaaatcttcaagattgacattgtgctttggtacagggattcctgctatgattttctcccaataaaagcttcagatggaaagacctatgacgcatatatactgtatccaaagactgttggggaagggtctacctctgactgtgatatttttgtgtttaaagtcttgcctgaggtcttggaaaaacagtgtggatataagctgttcatttatggaagggatgactacgttggggaagacattgttgaggtcattaatgaaaacgtaaagaaaagcagaagactgattatcattttagtcagagaaacatcaggcttcagctggctgggtggttcatctgaagagcaaatagccatgtataatgctcttgttcaggatggaattaaagttgtcctgcttgagctggagaaaatccaagactatgagaaaatgccagaatcgattaaattcattaagcagaaacatggggctatccgctggtcaggggactttacacagggaccacagtctgcaaagacaaggttctggaagaatgtcaggtaccacatgccagtccagcgacggtcaccttcatctaaacaccagttactgtcaccagccactaaggagaaactgcaaagagaggctcacgtgcctctcgggtagcatggagaagttgccaagagttctttaggtgcctcctgtcttatggcgttgcaggccaggttatgcctcatgctgacttgcagagttcatggaatgtaactatatcatcctttatccctgaggtcacctggaatcagattattaagggaataagccatgacgtcaatagcagcccagggcacttcagagtagagggcttgggaagatcttttaaaaaggcagtaggcccggtgtggtggctcacgcctataatcccagcactttgggaggctgaagtgggtggatcaccagaggtcaggagttcgagaccagcccagccaacatggcaaaaccccatctctactaaaaatacaaaaatgagctaggcatggtggcacacgcctgtaatcccagctacacctgaggctgaggcaggagaattgcttgaaccggggagacggaggttgcagtgagccgagtttgggccactgcactctagcctggcaacagagcaagactccgtctcaaaaaaagggcaataaatgccctctctgaatgtttgaactgccaagaaaaggcatggagacagcgaactagaagaaagggcaagaaggaaatagccaccgtctacagatggcttagttaagtcatccacagcccaagggcggggctatgccttgtctggggaccctgtagagtcactgaccctggagcggctctcctgagaggtgctgcaggcaaagtgagactgacacctcactgaggaagggagacatattcttggagaactttccatctgcttgtattttccatacacatccccagccagaagttagtgtccgaagaccgaattttattttacagagcttgaaaactcacttcaatgaacaaagggattctccaggattccaaagttttgaagtcatcttagctttccacaggagggagagaacttaaaaaagcaacagtagcagggaattgatccacttcttaatgctttcctccctggcatgaccatcctgtcctttgttattatcctgcattttacgtctttggaggaacagctccctagtggcttcctccgtctgcaatgtcccttgcacagcccacacatgaaccatccttcccatgatgccgctcttctgtcatcccgctcctgctgaaacacctcccaggggctccacctgttcaggagctgaagcccatgctttcccaccagcatgtcactcccagaccacctccctgccctgtcctccagcttcccctcgctgtcctgctgtgtgaattcccaggttggcctggtggccatgtcgcctgcccccagcactcctctgtctctgctcttgcctcgacccttcctcctcctttgcctaggaggccttctcgcattttctctagctgatcagaattttaccaaaattcagaacatcctccaattccacagtctctgggagactttccctaagaggcgacttcctctccagccttctctctctggtcaggcccactgcagagatggtggtgagcacatctgggaggctggtctccctccagctggaattgctgctctctgagggagaggctgtggtggctgtctctgtccctcactgccttccaggagcaatttgcacatgtaacatagatttatgtaatgctttatgtttaaaaacattccccaattatcttatttaatttttgcaattattctaattttatatatagagaaagtgacctattttttaaaaaaatcacactctaagttctattgaacctaggacttgagcctccatttctggcttctagtctggtgttctgagtacttgatttcaggtcaataacggtcccccctcactccacactggcacgtttgtgagaagaaatgacattttgctaggaagtgaccgagtctaggaatgcttttattcaagacaccaaattccaaacttctaaatgttggaattttcaaaaattgtgtttagattttatgaaaaactcttctactttcatctattctttccctagaggcaaacatttcttaaaatgtttcattttcattaaaaatgaaagccaaatttatatgccaccgattgcaggacacaagcacagttttaagagttgtatgaacatggagaggacttttggtttttatatttctcgtatttaatatgggtgaacaccaacttttatttggaataataattttcctcctaaacaaaaacacattgagtttaagtctctgactcttgcctttccacctgctttctcctgggcccgctttgcctgcttgaaggaacagtgctgttctggagctgctgttccaacagacagggcctagctttcatttgacacacagactacagccagaagcccatggagcagggatgtcacgtcttgaaaagcctattagatgttttacaaatttaattttgcagattattttagtctgtcatccagaaaatgtgtcagcatgcatagtgctaagaaagcaagccaatttggaaacttaggttagtgacaaaattggccagagagtgggggtgatgatgaccaagaattacaagtagaatggcagctggaatttaaggagggacaagaatcaatggataagcgtgggtggaggaagatccaaacagaaaagtgcaaagttattccccatcttccaagggttgaattctggaggaagaagacacattcctagttccccgtgaacttcctttgacttattgtccccactaaaacaaaacaaaaaacttttaatgccttccacattaattagattttcttgcagtttttttatggcatttttttaaagatgccctaagtgttgaagaagagtttgcaaatgcaacaaaaatatttaattaccggttgttaaaactggtttagcacaatttatattttccctctcttgcctttcttatttgcaataaaaggtattgagccattttttaaatgacatttttgataaattatgtttgtactagttgatgaaggagttttttttaacctgtttatataattttgcagcagaagccaaattttttgtatattaaagcaccaaattcatgtacagcatgcatcacggatcaatagactgtacttattttccaataaaattttcaaactttgtactgttaaa

SEQ ID NO: 1126 - DNA, 4034 bp; single-stranded, linear
  immediate source library: GENBANK
  immediate source clone: g186322
gcagccagagctcagcagggccctggagagatggccacggtcccagcaccggggaggactggagagcgcgcgctgccaccgccccatgtctcagccagggcttccttcctcggctccaccctgtggatgtaatggcggcccctgctctgtcctggcgtctgcccctcctcatcctcctcctgcccctggctacctcttgggcatctgcagcggtgaatggcacttcccagttcacatgcttctacaactcgagagccaacatctcctgtgtctggagccaagatggggctctgcaggacacttcctgccaagtccatgcctggccggacagacggcggtggaaccaaacctgtgagctgctccccgtgagtcaagcatcctgggcctgcaacctgatcctcggagccccagattctcagaaactgaccacagttgacatcgtcaccctgagggtgctgtgccgtgagggggtgcgatggagggtgatggccatccaggacttcaagccctttgagaaccttcgcctgatggcccccatctccctccaagttgtccacgtggagacccacagatgcaacataagctgggaaatctcccaagcctcccactactttgaaagacacctggagttcgaggcccggacgctgtccccaggccacacctgggaggaggcccccctgctgactctcaagcagaagcaggaatggatctgcctggagacgctcaccccagacacccagtatgagtttcaggtgcgggtcaagcctctgcaaggcgagttcacgacctggagcccctggagccagcccctggccttcaggacaaagcctgcagcccttgggaaggacaccattccgtggctcggccacctcctcgtgggcctcagcggggcttttggcttcatcatcttagtgtacttgctgatcaactgcaggaacaccgggccatggctgaagaaggtcctgaagtgtaacaccccagacccctcgaagttcttttcccagctgagctcagagcatggaggagacgtccagaagtggctctcttcgcccttcccctcatcgtccttcagccctggcggcctggcacctgagatctcgccactagaagtgctggagagggacaaggtgacgcagctgctcctgcagcaggacaaggtgcctgagcccgcatccttaagcagcaaccactcgctgaccagctgcttcaccaaccagggttacttcttcttccacctcccggatgccttggagatagaggcctgccaggtgtactttacttacgacccctactcagaggaagaccctgatgagggtgtggccggggcacccacagggtcttccccccaacccctgcagcctctgtcaggggaggacgacgcctactgcaccttcccctccagggatgacctgctgctcttctcccccagtctcctcggtggccccagccccccaagcactgcccctgggggcagtggggccggtgaagagaggatgcccccttctttgcaagaaagagtccccagagactgggacccccagcccctggggcctcccaccccaggagtcccagacctggtggattttcagccaccccctgagctggtgctgcgagaggctggggaggaggtccctgacgctggccccagggagggagtcagtttcccctggtccaggcctcctgggcagggggagttcagggcccttaatgctcgcctgcccctgaacactgatgcctacttgtccctccaagaactccagggtcaggacccaactcacttggtgtagacagatggccagggtgggaggcaggcagctgcctgctctgcgccgagcctcagaaggaccctgttgagggtcctcagtccactgctgaggacactcagtgtccagttgcagctggacttctccacccggatggcccccacccagtcctgcacacttggtccatccatttccaaacctccactgctgctcccgggtcctgctgcccgagccaggaactgtgtgtgttgcaggggggcagtaactccccaactccctcgttaatcacaggatcccacgaatttaggctcagaagcatcgctcctctccagccctgcagctattcaccaatatcagtcctcgcggctctccagggctccctgccctgacctcttccctgggttttctgccccagcctcctccttccctcccctccccgtccacagggcagcctgagcgtgctttccaaaacccaaatatggccacgctccccctcggttcaaaaccttgcacaggtcccactgccctcagccccacttctcagcctggtacttgtacctccggtgtcgtgtggggacatccccttctgcaatcctccctaccgtcctcccgagccactcagagctccctcacaccccctctgttgcacatgctattccctggggctgctgtgcgctccccctcatctaggtgacaaacttccctgactcttcaagtgccggttttgcttctcctggagggaagcactgcctcccttaatctgccagaaacttctagcgtcagtgctggagggagaagctgtcagggacccagggcgcctggagaaagaggccctgttactattcctttgggatctctgaggcctcagagtgcttggctgctgtatctttaatgctggggcccaagtaagggcacagatccccccacaaagtggatgcctgctgcatcttcccacagtggcttcacagacccacaagagaagctgatggggagtaaaccctggagtccgaggcccaggcagcagccccgcctagtggtgggccctgatgctgccaggcctgggacctcccactgccccctccactggaggggtctcctctgcagctcagggactggcacactggcctccagaagggcagctccacagggcagggcctcattatttttcactgccccagacacagtgcccaacaccccgtcgtataccctggatgaacgaattaattacctggcaccacctcgtctgggctccctgcgcctgacattcacacagagaggcagagtcccgtgcccattaggtctggcatgccccctcctgcaaggggctcaaccccctaccccgacccctccacgtatctttcctaggcagatcacgttgcaatggctcaaacaacattccaccccagcaggacagtgaccccagtcccagctaactctgacctgggagccctcaggcacctgcacttacaggccttgctcacagctgattgggcacctgaccacacgcccccacaggctctgaccagcagcctatgagggggtttggcaccaagctctgtccaatcaggtaggctgggcctgaactagccaatcagatcaactctgtcttgggcgtttgaactcagggagggaggcccttgggagcaggtgcttgtggacaaggctccacaagcgttgagccttggaaaggtagacaagcgttgagccactaagcagaggaccttgggttcccaatacaaaaatacctactgctgagagggctgctgaccatttggtcaggattcctgttgcctttatatccaaaataaactcccctttcttgaggttgtctgagtcttgggtctatgccttgaaaaaagctgaattattggacagtctcacctcctgccatagggtcctgaatgtttcagaccacaaggggctccacacctttgctgtgtgttctggggcaacctactaatcctctctgcaagtcggtctccttatccccccaaatggaaattgtatttgccttctccactttgggaggctcccacttcttgggagggttacattttttaagtcttaatcatttgtgacatatgtatctatacatccgtatcttttaatgatccgtgtgtaccatctttgtgattatttccttaatattttttctttaagtcagttcattttcgttgaaatacatttataaagaaaaatctttgttactctgtaaatgaaaaaacccattttcgctataaataaaaggtaactgtacaaaataagtacaat

SEQ ID NO: 1127 - DNA, 674 bp; single-stranded, linear
  immediate source library: GENBANK
  immediate source clone: g186326
gatccaaacatgagccgcctgcccgtcctgctcctgctccaactcctggtccgccccggactccaagctcccatgacccagacaacgtccttgaagacaagctgggttaactgctctaacatgatcgatgaaattataacacacttaaagcagccacctttgcctttgctggacttcaacaacctcaatggggaagaccaagacattctgatggaaaataaccttcgaaggccaaacctggaggcattcaacagggctgtcaagagtttacagaacgcatcagcaattgagagcattcttaaaaatctcctgccatgtctgcccctggccacggccgcacccacgcgacatccaatccatatcaaggacggtgactggaatgaattccggaggaaactgacgttctatctgaaaacccttgagaatgcgcaggctcaacagacgactttgagcctcgcgatcttttagtccaacgtccagctcgttctctgggccttctcaccacagcgcctcgggacatcaaaaacagcagaacttctgaaacctctgggtcatctctcacacattccaggaccagaagcatttcaccttttcctgcggcatcagatgaattgttaattatctaatttctgaaatgtgcagctcccatttggccttgtgcggttgtgttctca

SEQ ID NO: 1128 - DNA, 1460 bp; single-stranded, linear
  immediate source library: GENBANK
  immediate source clone: g186330
gcacacgggaagatatcagaaacatcctaggatcaggacaccccagatcttctcaactggaaccacgaaggctgtttcttccacacagcactttgatctccatttaagcaggcacctctgtcctgcgttccggagctgcgttcccgatggtcctcctttggctcacgctgctcctgatcgccctgccctgtctcctgcaaacgaaggaagatccaaacccaccaatcacgaacctaaggatgaaagcaaaggctcagcagttgacctgggaccttaacagaaatgtgaccgatatcgagtgtgttaaagatgccgactattctatgccggcagtgaacaatagctattgccagtttggagcaatttccttatgtgaagtgaccaactacaccgtccgagtggccaacccaccattctccacgtggatcctcttccctgagaacagtgggaagccttgggcaggtgcggagaatctgacctgctggattcatgacgtggatttcttgagctgcagctgggcggtaggcccgggggcccccgcggacgtccagtacgacctgtacttgaacgttgccaacaggcgtcaacagtacgagtgtcttcactacaaaacggatgctcagggaacacgtatcgggtgtcgtttcgatgacatctctcgactctccagcggttctcaaagttcccacatcctggtgcggggcaggagcgcagccttcggtatcccctgcacagataagtttgtcgtcttttcacagattgagatattaactccacccaacatgactgcaaagtgtaataagacacattcctttatgcactggaaaatgagaagtcatttcaatcgcaaatttcgctatgagcttcagatacaaaagagaatgcagcctgtaatcacagaacaggtcagagacagaacctccttccagctactcaatcctggaacgtacacagtacaaataagagcccgggaaagagtgtatgaattcttgagcgcctggagcaccccccagcgcttcgagtgcgaccaggaggagggcgcaaacacacgtgcctggcggacgtcgctgctgatcgcgctggggacgctgctggccctggtctgtgtcttcgtgatctgcagaaggtatctggtgatgcagagactctttccccgcatccctcacatgaaagaccccatcggtgacagcttccaaaacgacaagctggtggtctgggaggcgggcaaagccggcctggaggagtgtctggtgactgaagtacaggtcgtgcagaaaacttgagactggggttcagggcttgtgggggtctgcctcaatctccctggccgggccaggcgcctgcacagactggctgctggacctgcgcacgcagcccaggaatggacattcctaacgggtggtgggcatgggagatgcctgtgtaatttcgtccgaagctgccaggaagaagaacagaac

SEQ ID NO: 1129 - DNA, 614 bp; single-stranded, linear
  immediate source library: GENBANK
  immediate source clone: g186334
gatcgttagcttctcctgataaactaattgcctcacattgtcactgcaaatcgacacctattaatgggtctcacctcccaactgcttccccctctgttcttcctgctagcatgtgccggcaactttgtccacggacacaagtgcgatatcaccttacaggagatcatcaaaactttgaacagcctcacagagcagaagactctgtgcaccgagttgaccgtaacagacatctttgctgcctccaagaacacaactgagaaggaaaccttctgcagggctgcgactgtgctccggcagttctacagccaccatgagaaggacactcgctgcctgggtgcgactgcacagcagttccacaggcacaagcagctgatccgattcctgaaacggctcgacaggaacctctggggcctggcgggcttgaattcctgtcctgtgaaggaagccaaccagagtacgttggaaaacttcttggaaaggctaaagacgatcatgagagagaaatattcaaagtgttcgagctgaatattttaatttatgagtttttgatagctttattttttaagtatttatatatttataactcatcataaaataaagtatatatagaatct

SEQ ID NO: 1130 - DNA, 3319 bp; single-stranded, linear
  immediate source library: GENBANK
  immediate source clone: g186346
ggcggtcccctgttctccccgctcaggtgcggcgctgtggcaggaagccaccccctcggtcggccggtgcgcggggctgttgcgccatccgctccggctttcgtaaccgcaccctgggacggcccagagacgctccagcgcgagttcctcaaatgttttcctgcgttgccaggaccgtccgccgctctgagtcatgtgcgagtgggaagtcgcactgacactgagccgggccagagggagaggagccgagcgcggcgcggggccgagggactcgcagtgtgtgtagagagccgggctcctgcggatgggggctgcccccggggcctgagcccgcctgcccgcccaccgccccgccccgcccctgccacccctgccgcccggttcccattagcctgtccgcctctgcgggaccatggagtggtagccgaggaggaagcatgctggccgtcggctgcgcgctgctggctgccctgctggccgcgccgggagcggcgctggccccaaggcgctgccctgcgcaggaggtggcaagaggcgtgctgaccagtctgccaggagacagcgtgactctgacctgcccgggggtagagccggaagacaatgccactgttcactgggtgctcaggaagccggctgcaggctcccaccccagcagatgggctggcatgggaaggaggctgctgctgaggtcggtgcagctccacgactctggaaactattcatgctaccgggccggccgcccagctgggactgtgcacttgctggtggatgttccccccgaggagccccagctctcctgcttccggaagagccccctcagcaatgttgtttgtgagtggggtcctcggagcaccccatccctgacgacaaaggctgtgctcttggtgaggaagtttcagaacagtccggccgaagacttccaggagccgtgccagtattcccaggagtcccagaagttctcctgccagttagcagtcccggagggagacagctctttctacatagtgtccatgtgcgtcgccagtagtgtcgggagcaagttcagcaaaactcaaacctttcagggttgtggaatcttgcagcctgatccgcctgccaacatcacagtcactgccgtggccagaaacccccgctggctcagtgtcacctggcaagacccccactcctggaactcatctttctacagactacggtttgagctcagatatcgggctgaacggtcaaagacattcacaacatggatggtcaaggacctccagcatcactgtgtcatccacgacgcctggagcggcctgaggcacgtggtgcagcttcgtgcccaggaggagttcgggcaaggcgagtggagcgagtggagcccggaggccatgggcacgccttggacagaatccaggagtcctccagctgagaacgaggtgtccacccccatgcaggcacttactactaataaagacgatgataatattctcttcagagattctgcaaatgcgacaagcctcccagtgcaagattcttcttcagtaccactgcccacattcctggttgctggagggagcctggccttcggaacgctcctctgcattgccattgttctgaggttcaagaagacgtggaagctgcgggctctgaaggaaggcaagacaagcatgcatccgccgtactctttggggcagctggtcccggagaggcctcgacccaccccagtgcttgttcctctcatctccccaccggtgtcccccagcagcctggggtctgacaatacctcgagccacaaccgaccagatgccagggacccacggagcccttatgacatcagcaatacagactacttcttccccagatagctggctgggtggcaccagcagcctggaccctgtggatgacaaaacacaaacgggctcagcaaaagatgcttctcactgccatgccagcttatctcaggggtgtgcggcctttggcttcacggaagagccttgcggaaggttctacgccaggggaaaatcagcctgctccagctgttcagctggttgaggtttcaaacctccctttccaaatgcccagcttaaaggggttagagtgaacttgggccactgtgaagagaaccatatcaagactctttggacactcacacggacactcaaaagctgggcaggttggtgggggcctcggtgtggagaagcggctggcagcccacccctcaacacctctgcacaagctgcaccctcaggcaggtgggatggatttccagccaaagcctcctccagccgccatgctcctggcccactgcatcgtttcatcttccaactcaaactcttaaaacccaagtgcccttagcaaattctgtttttctaggcctggggacggcttttacttaaacgccaaggcctgggggaagaagctctctcctccctttcttccctacagttcaaaaacagctgagggtgagtgggtgaataatacagtatgtcagggcctggtcgttttcaacagaattataattagttcctcattagcagttttgcctaaatgtgaatgatgatcctaggcatttgctgaatacagaggcaactgcattggctttgggttgcaggacctcaggtgagaagcagaggaaggagaggagaggggcacagggtctctaccatcccctgtagagtgggagctgagtgggggatcacagcctctgaaaaccaatgttctctcttctccacctcccacaaaggagagctagcagcagggagggcttctgccatttctgagatcaaaacggttttactgcagctttgtttgttgtcagctgaacctgggtaactagggaagataatattaaggaagacaatgtgaaaagaaaaatgagcctggcaagaatgcgtttaaacttggtttttaaaaaactgctgactgttttctcttgagagggtggaatatccaatattcgctgtgtcagcatagaagtaacttacttaggtgtgggggaagcaccataactttgtttagcccaaaaccaagtcaagtgaaaaaggaggaagagaaaaaatattttcctgccaggcatggaggcccacgcacttcgggaggtcgaggcaggaggatcacttgagtccagaagtttgagatcagcctgggcaatgtgataaaaccccatctctacaaaaagcataaaaattagccaagtgtggtagagtgtgcctgaagtcccagatacttggggggctgaggtgggaggatctcttgagcctgggaggtcaaggctgcagtgagccgagattgcaccactgcactccagcctggggtgacagagcaagtgagaccctgtctc

SEQ ID NO: 1131 - DNA, 3085 bp; single-stranded, linear
  immediate source library: GENBANK
  immediate source clone: g186353
gagcagccaaaaggcccgcggagtcgcgctgggccgccccggcgcagctgaaccgggggccgcgcctgccaggccgacgggtctggcccagcctggcgccaaggggttcgtgcgctgtggagacgcggagggtcgaggcggcgcggcctgagtgaaacccaatggaaaaagcatgacatttagaagtagaagacttagcttcaaatccctactccttcacttactaattttgtgatttggaaatatccgcgcaagatgttgacgttgcagacttgggtagtgcaagccttgtttattttcctcaccactgaatctacaggtgaacttctagatccatgtggttatatcagtcctgaatctccagttgtacaacttcattctaatttcactgcagtttgtgtgctaaaggaaaaatgtatggattattttcatgtaaatgctaattacattgtctggaaaacaaaccattttactattcctaaggagcaatatactatcataaacagaacagcatccagtgtcacctttacagatatagcttcattaaatattcagctcacttgcaacattcttacattcggacagcttgaacagaatgtttatggaatcacaataatttcaggcttgcctccagaaaaacctaaaaatttgagttgcattgtgaacgaggggaagaaaatgaggtgtgagtgggatggtggaagggaaacacacttggagacaaacttcactttaaaatctgaatgggcaacacacaagtttgctgattgcaaagcaaaacgtgacacccccacctcatgcactgttgattattctactgtgtattttgtcaacattgaagtctgggtagaagcagagaatgcccttgggaaggttacatcagatcatatcaattttgatcctgtatataaagtgaagcccaatccgccacataatttatcagtgatcaactcagaggaactgtctagtatcttaaaattgacatggaccaacccaagtattaagagtgttataatactaaaatataacattcaatataggaccaaagatgcctcaacttggagccagattcctcctgaagacacagcatccacccgatcttcattcactgtccaagaccttaaaccttttacagaatatgtgtttaggattcgctgtatgaaggaagatggtaagggatactggagtgactggagtgaagaagcaagtgggatcacctatgaagatagaccatctaaagcaccaagtttctggtataaaatagatccatcccatactcaaggctacagaactgtacaactcgtgtggaagacattgcctccttttgaagccaatggaaaaatcttggattatgaagtgactctcacaagatggaaatcacatttacaaaattacacagttaatgccacaaaactgacagtaaatctcacaaatgatcgctatctagcaaccctaacagtaagaaatcttgttggcaaatcagatgcagctgttttaactatccctgcctgtgactttcaagctactcaccctgtaatggatcttaaagcattccccaaagataacatgctttgggtggaatggactactccaagggaatctgtaaagaaatatatacttgagtggtgtgtgttatcagataaagcaccctgtatcacagactggcaacaagaagatggtaccgtgcatcgcacctatttaagagggaacttagcagagagcaaatgctatttgataacagttactccagtatatgctgatggaccaggaagccctgaatccataaaggcataccttaaacaagctccaccttccaaaggacctactgttcggacaaaaaaagtagggaaaaacgaagctgtcttagagtgggaccaacttcctgttgatgttcagaatggatttatcagaaattatactatattttatagaaccatcattggaaatgaaactgctgtgaatgtggattcttcccacacagaatatacattgtcctctttgactagtgacacattgtacatggtacgaatggcagcatacacagatgaaggtgggaaggatggtccagaattcacttttactaccccaaagtttgctcaaggagaaattgaagccatagtcgtgcctgtttgcttagcattcctattgacaactcttctgggagtgctgttctgctttaataagcgagacctaattaaaaaacacatctggcctaatgttccagatccttcaaagagtcatattgcccagtggtcacctcacactcctccaaggcacaattttaattcaaaagatcaaatgtattcagatggcaatttcactgatgtaagtgttgtggaaatagaagcaaatgacaaaaagccttttccagaagatctgaaatcattggacctgttcaaaaaggaaaaaattaatactgaaggacacagcagtggtattggggggtcttcatgcatgtcatcttctaggccaagcatttctagcagtgatgaaaatgaatcttcacaaaacacttcgagcactgtccagtattctaccgtggtacacagtggctacagacaccaagttccgtcagtccaagtcttctcaagatccgagtctacccagcccttgttagattcagaggagcggccagaagatctacaattagtagatcatgtagatggcggtgatggtattttgcccaggcaacagtacttcaaacagaactgcagtcagcatgaatccagtccagatatttcacattttgaaaggtcaaagcaagtttcatcagtcaatgaggaagattttgttagacttaaacagcagatttcagatcatatttcacaatcctgtggatctgggcaaatgaaaatgtttcaggaagtttctgcagcagatgcttttggtccaggtactgagggacaagtagaaagatttgaaacagttggcatggaggctgcgactgatgaaggcatgcctaaaagttacttaccacagactgtacggcaaggcggctacatgcctcagtgaaggactagtagttcctgctacaacttcagcagtacctataaagtaaagctaaaatgattttatctgtgaattc

SEQ ID NO: 1132 - DNA, 1589 bp; single-stranded, linear
  immediate source library: GENBANK
  immediate source clone: g186363
gaattcctctggtcctcatccaggtgcgcgggaagcaggtgcccaggagagaggggataatgaagattccatgctgatgatcccaaagattgaacctgcagaccaagcgcaaagtagaaactgaaagtacactgctggcggatcctacggaagttatggaaaaggcaaagcgcagagccacgccgtagtgtgtgccgccccccttgggatggatgaaactgcagtcgcggcgtgggtaagaggaaccagctgcagagatcaccctgcccaacacagactcggcaactccgcggaagaccagggtcctgggagtgactatgggcggtgagagcttgctcctgctccagttgcggtcatcatgactacgcccgcctcccgcagaccatgttccatgtttcttttaggtatatctttggacttcctcccctgatccttgttctgttgccagtagcatcatctgattgtgatattgaaggtaaagatggcaaacaatatgagagtgttctaatggtcagcatcgatcaattattggacagcatgaaagaaattggtagcaattgcctgaataatgaatttaacttttttaaaagacatatctgtgatgctaataaggaaggtatgtttttattccgtgctgctcgcaagttgaggcaatttcttaaaatgaatagcactggtgattttgatctccacttattaaaagtttcagaaggcacaacaatactgttgaactgcactggccaggttaaaggaagaaaaccagctgccctgggtgaagcccaaccaacaaagagtttggaagaaaataaatctttaaaggaacagaaaaaactgaatgacttgtgtttcctaaagagactattacaagagataaaaacttgttggaataaaattttgatgggcactaaagaacactgaaaaatatggagtggcaatatagaaacacgaactttagctgcatcctccaagaatctatctgcttatgcagtttttcagagtggaatgcttcctagaagttactgaatgcaccatggtcaaaacggattagggcatttgagaaatgcatattgtattactagaagatgaatacaaacaatggaaactgaatgctccagtcaacaaactatttcttatatatgtgaacatttatcaatcagtataattctgtactgatttttgtaagacaatccatgtaaggtatcagttgcaataatacttctcaaacctgtttaaatatttcaagacattaaatctatgaagtatataatggtttcaaagattcaaaattgacattgctttactgtcaaaataattttatggctcactatgaatctattatactgtattaagagtgaaaattgtcttcttctgtgctggagatgttttagagttaacaatgatatatggataatgccggtgagaataagagagtcataaaccttaagtaagcaacagcataacaaggtccaagatacctaaaagagatttcaagagatttaattaatcatgaatgtgtaacacagtgccttcaataaatggtatagcaaatgttttgacatgaaaaaaggacaatttcaaaaaaataaaat

SEQ ID NO: 1133 - DNA, 1658 bp; single-stranded, linear
  immediate source library: GENBANK
  immediate source clone: g186365
ctctctctctatctctctcagaatgacaattctaggtacaacttttggcatggttttttctttacttcaagtcgtttctggagaaagtggctatgctcaaaatggagacttggaagatgcagaactggatgactactcattctcatgctatagccagttggaagtgaatggatcgcagcattcactgacctgtgcttttgaggacccagatgtcaacaccaccaatctggaatttgaaatatgtggggccctcgtggaggtaaagtgcctgaatttcaggaaactacaagagatatatttcatcgagacaaagaaattcttactgattggaaagagcaatatatgtgtgaaggttggagaaaagagtctaacctgcaaaaaaatagacctaaccactatagttaaacctgaggctccttttgacctgagtgtcatctatcgggaaggagccaatgactttgtggtgacatttaatacatcacacttgcaaaagaagtatgtaaaagttttaatgcatgatgtagcttaccgccaggaaaaggatgaaaacaaatggacgcatgtgaatttatccagcacaaagctgacactcctgcagagaaagctccaaccggcagcaatgtatgagattaaagttcgatccatccctgatcactattttaaaggcttctggagtgaatggagtccaagttattacttcagaactccagagatcaataatagctcaggggagatggatcctatcttactaaccatcagcattttgagttttttctctgtcgctctgttggtcatcttggcctgtgtgttatggaaaaaaaggattaagcctatcgtatggcccagtctccccgatcataagaagactctggaacatctttgtaagaaaccaagaaaaaatttaaatgtgagtttcaatcctgaaagtttcctggactgccagattcatagggtggatgacattcaagctagagatgaagtggaaggttttctgcaagatacgtttcctcagcaactagaagaatctgagaagcagaggcttggaggggatgtgcagagccccaactgcccatctgaggatgtagtcgtcactccagaaagctttggaagagattcatccctcacatgcctggctgggaatgtcagtgcatgtgacgcccctattctctcctcttccaggtccctagactgcagggagagtggcaagaatgggcctcatgtgtaccaggacctcctgcttagccttgggactacaaacagcacgctgccccctccattttctctccaatctggaatcctgacattgaacccagttgctcagggtcagcccattcttacttccctgggatcaaatcaagaagaagcatatgtcaccatgtccagcttctaccaaaaccagtgaagtgtaagaaacccagactgaacttaccgtgagcgacaaagatgatttaaaagggaagtctagagttcctagtctccctcacagcacagagaagacaaaattagcaaaaccccactacacagtctgcaagattctgaaacattgctttgaccactcttcctgagttcagtggcactcaacatgagtcaagagcatcctgcttctaccatgtggatttggtcacaaggtttaaggtgacccaatgattcagctattt

SEQ ID NO: 1134 - DNA, 1933 bp; single-stranded, linear
  immediate source library: GENBANK
  immediate source clone: g186369
cctggccggtgcttcagttagatcaaaccattgctgaaactgaagaggacatgtcaaatattacagatccacagatgtgggattttgatgatctaaatttcactggcatgccacctgcagatgaagattacagcccctgtatgctagaaactgagacactcaacaagtatgttgtgatcatcgcctatgccctagtgttcctgctgagcctgctgggaaactccctggtgatgctggtcatcttatacagcagggtcggccgctccgtcactgatgtctacctgctgaacctggccttggccgacctactctttgccctgaccttgcccatctgggccgcctccaaggtgaatggctggatttttggcacattcctgtgcaaggtggtctcactcctgaaggaagtcaacttctacagtggcatcctgctgttggcctgcatcagtgtggaccgttacctggccattgtccatgccacacgcacactgacccagaagcgtcacttggtcaagtttgtttgtcttggctgctggggactgtctatgaatctgtccctgcccttcttccttttccgccaggcttaccatccaaacaattccagtccagtttgctatgaggtcctgggaaatgacacagcaaaatggcggatggtgttgcggatcctgcctcacacctttggcttcatcgtgccgctgtttgtcatgctgttctgctatggattcaccctgcgtacactgtttaaggcccacatggggcagaagcaccgagccatgagggtcatctttgctgtcgtcctcatcttcctgctttgctggctgccctacaacctggtcctgctggcagacaccctcatgaggacccaggtgatccaggagacctgtgagcgccgcaacaacatcggccgggccctggatgccactgagattctgggatttctccatagctgcctcaaccccatcatctacgccttcatcggccaaaattttcgccatggattcctcaagatcctggctatgcatggcctggtcagcaaggagttcttggcacgtcatcgtgttacctcctacacttcttcgtctgtcaatgtctcttccaacctctgaaaaccatcgatgaaggaatatctcttctcagaaggaaagaataaccaacaccctgaggttgtgtgtggaaggtgatctggctctggacaggcactatctgggttttggggggacgctataggatgtggggaagttaggaactggtgtcttcaggggccacaccaaccttctgaggagctgttgaggtacctccaaggaccggcctttgcacctccatggaaacgaagcaccatcattcccgttgaacgtcacatctttaacccactaactggctaattagcatggccacatctgagccccgaatctgacattagatgagagaacagggctgaagctgtgtcctcatgagggctggatgctctcgttgaccctcacaggagcatctcctcaactctgagtgttaagcgttgagccaccaagctggtggctctgtgtgctctgatccgagctcaggggggtggttttcccatctcaggtgtgttgcagtgtctgctggagacattgaggcaggcactgccaaaacatcaacctgccagctggccttgtgaggagctggaaacacatgttccccttgggggtggtggatgaacaaagagaaagagggtttggaagccagatctatgccacaagaaccccctttacccccatgaccaacatcgcagacacatgtgctggccacctgctgagccccaagtggaacgagacaagcagcccttagcccttcccctctgcagcttccaggctggcgtgcagcatcagcatccctagaaagccatgtgcagccaccagtccattgggcaggcagatgttcctaataaagcttctgttcc

SEQ ID NO: 1135 - DNA, 1750 bp; single-stranded, linear
  immediate source library: GENBANK
  immediate source clone: g186377
cctacaggtgaaaagcccagcgacccagtcaggatttaagtttacctcaaaaatggaagattttaacatggagagtgacagctttgaagatttctggaaaggtgaagatcttagtaattacagttacagctctaccctgcccccttttctactagatgccgccccatgtgaaccagaatccctggaaatcaacaagtattttgtggtcattatctatgccctggtattcctgctgagcctgctgggaaactccctcgtgatgctggtcatcttatacagcagggtcggccgctccgtcactgatgtctacctgctgaacctagccttggccgacctactctttgccctgaccttgcccatctgggccgcctccaaggtgaatggctggatttttggcacattcctgtgcaaggtggtctcactcctgaaggaagtcaacttctatagtggcatcctgctactggcctgcatcagtgtggaccgttacctggccattgtccatgccacacgcacactgacccagaagcgctacttggtcaaattcatatgtctcagcatctggggtctgtccttgctcctggccctgcctgtcttacttttccgaaggaccgtctactcatccaatgttagcccagcctgctatgaggacatgggcaacaatacagcaaactggcggatgctgttacggatcctgccccagtcctttggcttcatcgtgccactgctgatcatgctgttctgctacggattcaccctgcgtacgctgtttaaggcccacatggggcagaagcaccgggccatgcgggtcatctttgctgtcgtcctcatcttcctgctttgctggctgccctacaacctggtcctgctggcagacaccctcatgaggacccaggtgatccaggagacctgtgagcgccgcaatcacatcgaccgggctctggatgccaccgagattctgggcatccttcacagctgcctcaaccccctcatctacgccttcattggccagaagtttcgccatggactcctcaagattctagctatacatggcttgatcagcaaggactccctgcccaaagacagcaggccttcctttgttggctcttcttcagggcacacttccactactctctaagacctcctgcctaagtgcagccccgtggggttcctcccttctcttcacagtcacattccaagcctcatgtccactggttcttcttggtctcagtgtcaatgcagcccccattgtggtcacaggaagcagaggaggccacgttcttactagtttcccttgcatggtttagaaagcttgccctggtgcctcaccccttgccataattactatgtcatttgctggagctctgcccatcctgcccctgagcccatggcactctatgttctaagaagtgaaaatctacactccagtgagacagctctgcatactcattaggatggctagtatcaaaagaaagaaaatcaggctggccaacgggatgaaaccctgtctctactaaaaatacaaaaaaaaaaaaaaaaattagccgggcgtggtggtgagtgcctgtaatcacagctacttgggaggctgagatgggagaatcacttgaacccgggaggcagaggttgcagtgagccgagattgtgcccctgcactccagcctgagcgacagtgagactctgtctcagtccatgaagatgtagaggagaaactggaactctcgagcgttgctgggggggattgtaaaatggt

SEQ ID NO: 1136 - DNA, 3465 bp; single-stranded, linear
  immediate source library: GENBANK
  immediate source clone: g186379
acaaggtctgtttcttttcccttaagaaccacaaaagtgctaattttccctttacaaatgttacataaaatcttgattacaaaactactcaacaacttaatcctaccatccatacaattatatgttccttttcagcaaggtcaaaagccaacgatgtagtccctttgtacactagagattctttacataatagaagttcacagactgaaatatcattgctgcagtctttggagaacagaactggtccatttctgtgaatcctttttgcacggacaagactcaagactggctaggtgaaaactggtggcagggaccccagccctcctgttaactttcaggaccacctacttcatcatcaagtctgagaggctgaggttcggtcagcagcagctccgctttggctctgatcatacagtttttagtaatctttcctgaaaaacactggctttctctggaaaagcttcctcagctggaagctttactccctcctcgacagaaagtgaggattacagatgacatggctcaggtattcgtggacggcgtgttccagaggcgcggggcgccgccgctgcagctgccgcgcgtgtgcacattcaggttcccgagcacaaacatcaagataacgttcactgccctgtccagcgagaagagagagaagcaggaggcgtctgagtctccagtgaaggccgtacagccacacatctcgcccctgaccatcaacattccagacaccatggcccacctcatcagccctctgccctcccccacgggaaccatcagcgctgcaaactcctgcccctccagcccccggggagcggggtcttcagggtacaaggtgggccgagtgatgccatctgacctcaatttaatggctgacaactcacagcctgaaaatgaaaaggaagcttcaggtggagacagcccgaaggatgattcaaagccgccttactcctacgcgcagctgatagttcaggcgattacgatggctcccgacaaacagctcaccctgaacgggatttatacacacatcactaaaaattatccctactacaggactgcggacaagggctggcagaattcaattcgccacaatctctctctgaatcgttatttcatcaaagtgccgcgttcccaggaagaaccaggcaaaggctcgttctggaggatagacccagcctctgaaagcaaattaatagaacaggcttttaggaaacgacggcctaggggcgtgccctgctttagaacccctctgggaccgctctcttctaggagtgccccagcctctcccaatcacgcgggagtgctgtctgctcactctagtggcgcccagacccctgagagcctgtcgagggaaggttcgccggcccccctggagcctgagcctggcgctgcacagcccaaactcgctgtcatccaggaagcccggtttgcccagagcgccccagggtcacctctgtccagtcagccagtcttaatcaccgtccagcggcagctaccacaggccatcaagcctgtcacctacactgtggccaccccagtgaccacctcgacctcccagccacccgtcgtgcagacggttcacgtcgtccaccagatcccagcggtgtcggtcaccagtgtggccggactggccccagcgaacacgtacactgtctctggacaagctgtggtcaccccggcagccgtgctggcccctcctaaggcagaggcccaggagaatggagaccacagggaagtcaaagtgaaagtagagcctattcccgccattggccacgccacgctcggcactgccagccggatcattcagacggcacagaccaccccggtccagacggtgaccatagtacaacaggcacctctaggtcaacaccagctaccaataaaaactgtaacacaaaacggcactcacgtggcatcagtccccactgcggtccacggccaggtgaacaatgggccccttggcctcagaaggcccccatgtgccagctcagactggagttgcctcagttgacacagcaggccccatccagacagaccagcaggtgcttctggagacaagagcaaagccttttccggcagcccggaacctgggatgagaaacgacaggtggaaggttgtccagagacacctacagcgtggatgctgttccgagtcagcgtaggagaaaggccactggaaaccagagtcacactgcgcgtctgtgcatctctggcctaccgcagtggccccggctgtctgcacattttttgtagacacattagagtcggttgaggccacacctgcggccacacctgcggccacagactgcgaccgcgattgcagggaggagcatctgaggtggtcacggggtttgcccagctcacaccaactgcagccgcggcgagtcctttgcacatgttggcaacacacgcatccgcatcggcctccctgcccacaaagcgccacaacggtgaccagccggagcagccggagctgaagcggatcaagacagaagacggcgagggcatcgtcattgccctgagcgtggacacgccaccggcagccgtaagggaaaagggtgtccagaactagcgaccgggagagcttttctttaacgatatcaactctgtggtgccaaaaggagacgcggcctcccgccagcactcgggggtgcagggccctgtggttggacttcacctctcagcactgaaaacccaaaacccagctggccttaacactccttaaagacagaagtcacacttgaacaaaacccacacacaacaaaacctgatttgggagacggtgtctccactgagcacctgctgggctgagcttctacctacgagtgaaactctgtcctcccgcgaggaccaggcatcgctgtgtgaggacggcacggccagcgcctgctgtgagtgggtctcccaagactaggcctcaggacgcggggggagccatccccgccgccctcacaggacccaccaggcagcggagacatgtggaattagagtattttgaggtgtcctttctttacaaaataatggggtcttgggcatttcacatcactccatttctactgagactttcagaatcacacaggccctttccgtggatttcatttggggcaaagaaacaacatagttttgtttttgttttcagcctatggaatgatttccttttgtctgtcttgttcaagttcagacgaagctactctggcatctgcacatttccgtgttacagcagctgcctgatgaattttatccacctccatttcagcatgtggctcgcgtggacaggtggacggacgctgtggccgcatggaaccttgagaacccagggacgagccagtgccgggaaggaactgccgggactcaccgagctgcacttaactgttctctttctggctattttttgttgtttgtttctttgtgttgactttgtccctggcaaaattttccactctgagtaaaacaagtctcggaattc

SEQ ID NO: 1137 - DNA, 4723 bp; single-stranded, linear
  immediate source library: GENBANK
  immediate source clone: g186439
ggggggctgcgcggccgggtcggtgcgcacacgagaaggacgcgcggcccccagcgctcttgggggccgcctcggagcatgacccccgcgggccagcgccgcgcgcctgatccgaggagaccccgcgctcccgcagccatgggcaccgggggccggcggggggcggcggccgcgccgctgctggtggcggtggccgcgctgctactgggcgccgcgggccacctgtaccccggagaggtgtgtcccggcatggatatccggaacaacctcactaggttgcatgagctggagaattgctctgtcatcgaaggacacttgcagatactcttgatgttcaaaacgaggcccgaagatttccgagacctcagtttccccaaactcatcatgatcactgattacttgctgctcttccgggtctatgggctcgagagcctgaaggacctgttccccaacctcacggtcatccggggatcacgactgttctttaactacgcgctggtcatcttcgagatggttcacctcaaggaactcggcctctacaacctgatgaacatcacccggggttctgtccgcatcgagaagaacaatgagctctgttacttggccactatcgactggtcccgtatcctggattccgtggaggataatcacatcgtgttgaacaaagatgacaacgaggagtgtggagacatctgtccgggtaccgcgaagggcaagaccaactgccccgccaccgtcatcaacgggcagtttgtcgaacgatgttggactcatagtcactgccagaaagtttgcccgaccatctgtaagtcacacggctgcaccgccgaaggcctctgttgccacagcgagtgcctgggcaactgttctcagcccgacgaccccaccaagtgcgtggcctgccgcaacttctacctggacggcaggtgtgtggagacctgcccgcccccgtactaccacttccaggactggcgctgtgtgaacttcagcttctgccaggacctgcaccacaaatgcaagaactcgcggaggcagggctgccaccaatacgtcattcacaacaacaagtgcatccctgagtgtccctccgggtacacgatgaattccagcaacttgctgtgcaccccatgcctgggtccctgtcccaaggtgtgccacctcctagaaggcgagaagaccatcgactcggtgacgtctgcccaggagctccgaggatgcaccgtcatcaacgggagtctgatcatcaacattcgaggaggcaacaatctggcagctgagctagaagccaacctcggcctcattgaagaaatttcagggtatctaaaaatccgccgatcctacgctctggtgtcactttccttcttccggaagttacgtctgattcgaggagagaccttggaaattgggaactactccttctatgccttggacaaccagaacctaaggcagctctgggactggagcaaacacaacctcaccaccactcaggggaaactcttcttccactataaccccaaactctgcttgtcagaaatccacaagatggaagaagtttcaggaaccaaggggcgccaggagagaaacgacattgccctgaagaccaatggggacaaggcatcctgtgaaaatgagttacttaaattttcttacattcggacatcttttgacaagatcttgctgagatgggagccgtactggccccccgacttccgagacctcttggggttcatgctgttctacaaagaggccccttatcagaatgtgacggagttcgatgggcaggatgcgtgtggttccaacagttggacggtggtagacattgacccacccctgaggtccaacgaccccaaatcacagaaccacccagggtggctgatgcggggtctcaagccctggacccagtatgccatctttgtgaagaccctggtcaccttttcggatgaacgccggacctatggggccaagagtgacatcatttatgtccagacagatgccaccaacccctctgtgcccctggatccaatctcagtgtctaactcatcatcccagattattctgaagtggaaaccaccctccgaccccaatggcaacatcacccactacctggttttctgggagaggcaggcggaagacagtgagctgttcgagctggattattgcctcaaagggctgaagctgccctcgaggacctggtctccaccattcgagtctgaagattctcagaagcacaaccagagtgagtatgaggattcggccggcgaatgctgctcctgtccaaagacagactctcagatcctgaaggagctggaggagtcctcgtttaggaagacgtttgaggattacctgcacaacgtggttttcgtccccagaaaaacctcttcaggcactggtgccgaggaccctaggccatctcggaaacgcaggtcccttggcgatgttgggaatgtgacggtggccgtgcccacggtggcagctttccccaacacttcctcgaccagcgtgcccacgagtccggaggagcacaggccttttgagaaggtggtgaacaaggagtcgctggtcatctccggcttgcgacacttcacgggctatcgcatcgagctgcaggcttgcaaccaggacacccctgaggaacggtgcagtgtggcagcctacgtcagtgcgaggaccatgcctgaagccaaggctgatgacattgttggccctgtgacgcatgaaatctttgagaacaacgtcgtccacttgatgtggcaggagccgaaggagcccaatggtctgatcgtgctgtatgaagtgagttatcggcgatatggtgatgaggagctgcatctctgcgtctcccgcaagcacttcgctctggaacggggctgcaggctgcgtgggctgtcaccggggaactacagcgtgcgaatccgggccacctcccttgcgggcaacggctcttggacggaacccacctatttctacgtgacagactatttagacgtcccgtcaaatattgcaaaaattatcatcggccccctcatctttgtctttctcttcagtgttgtgattggaagtatttatctattcctgagaaagaggcagccagatgggccgctgggaccgctttacgcttcttcaaaccctgagtatctcagtgccagtgatgtgtttccatgctctgtgtacgtgccggacgagtgggaggtgtctcgagagaagatcaccctccttcgagagctggggcagggctccttcggcatggtgtatgagggcaatgccagggacatcatcaagggtgaggcagagacccgcgtggcggtgaagacggtcaacgagtcagccagtctccgagagcggattgagttcctcaatgaggcctcggtcatgaagggcttcacctgccatcacgtggtgcgcctcctgggagtggtgtccaagggccagcccacgctggtggtgatggagctgatggctcacggagacctgaagagctacctccgttctctgcggccagaggctgagaataatcctggccgccctccccctacccttcaagagatgattcagatggcggcagagattgctgacgggatggcctacctgaacgccaagaagtttgtgcatcgggacctggcagcgagaaactgcatggtcgcccatgattttactgtcaaaattggagactttggaatgaccagagacatctatgaaacggattactaccggaaagggggcaagggtctgctccctgtacggtggatggcaccggagtccctgaaggatggggtcttcaccacttcttctgacatgtggtcctttggcgtggtcctttgggaaatcaccagcttggcagaacagccttaccaaggcctgtctaatgaacaggtgttgaaatttgtcatggatggagggtatctggatcaacccgacaactgtccagagagagtcactgacctcatgcgcatgtgctggcaattcaaccccaagatgaggccaaccttcctggagattgtcaacctgctcaaggacgacctgcaccccagctttccagaggtgtcgttcttccacagcgaggagaacaaggctcccgagagtgaggagctggagatggagtttgaggacatggagaatgtgcccctggaccgttcctcgcactgtcagagggaggaggcggggggccgggatggagggtcctcgctgggtttcaagcggagctacgaggaacacatcccttacacacacatgaacggaggcaagaaaaacgggcggattctgaccttgcctcggtccaatccttcctaacagtgcctaccgtggcgggggcgggcaggggttcccattttcgctttcctctggtttgaaagcctctggaaaactcaggattctcacgactctaccatgtccagtggagttcagagatcgttcctatacatttctgttcatcttaaggtggactcgtttggttaccaatttaactagtcctgcagaggatttaactgtgaacctggagggcaaggggtttccacagttgctgctcctttggggcaacgacggtttcaaaccaggattttgtgttttttcgttccccccacccgcccccagcagatggaaagaaagcacctgtttttacaaattcttttttttttttttttttttttttttttgctggtgtctgagcttcagtataaaagacaaaacttcctgtttgtggaacaaaatttcgaaagaaaaaaccaaa

SEQ ID NO: 1138 - DNA, 4637 bp; single-stranded, linear
  immediate source library: GENBANK
  immediate source clone: g186496
aggtgaacaggtcctcacgcccagctccgccccctcacgcgctctcgccgggaccccgcttccgctggcagccatgggccccggccccagccgcgcgccccgcgccccacgcctgatgctctgtgcgctcgccttgatggtggcggccggcggctgcgtcgtctccgccttcaacctggatacccgattcctggtagtgaaggaggccgggaacccgggcagcctcttcggctactcggtcgccctccatcggcagacagagcggcagcagcgctacctgctcctggctggtgccccccgggagctcgctgtgcccgatggctacaccaaccggactggtgctgtgtacctgtgcccactcactgcccacaaggatgactgtgagcggatgaacatcacagtgaaaaatgaccctggccatcacattattgaggacatgtggcttggagtgactgtggccagccagggccctgcaggcagagttctggtctgtgcccaccgctacacccaggtgctgtggtcagggtcagaagaccagcggcgcatggtgggcaagtgctacgtgcgaggcaatgacctagagctggactccagtgatgactggcagacctaccacaacgagatgtgcaatagcaacacagactacctggagacgggcatgtgccagctgggcaccagcggtggcttcacccagaacactgtgtacttcggcgcccccggtgcctacaactggaaaggaaacagctacatgattcagcgcaaggagtgggacttatctgagtatagttacaaggacccagaggaccaaggaaacctctatattgggtacacgatgcaggtaggcagcttcatcctgcaccccaaaaacatcaccattgtgacaggtgccccacggcaccgacatatgggcgcggtgttcttgctgagccaggaggcaggcggagacctgcggaggaggcaggtgctggagggctcgcaggtgggcgcctattttggcagcgcaattgccctggcagacctgaacaatgatgggtggcaggacctcctggtgggcgccccctactacttcgagaggaaagaggaagtagggggtgccatctatgtcttcatgaaccaggcgggaacctccttccctgctcacccctcactccttcttcatggccccagtggctctgcctttggtttatctgtggccagcattggtgacatcaaccaggatggatttcaggatattgctgtgggagctccgtttgaaggcttgggcaaagtgtacatctatcacagtagctctaaggggctccttagacagccccagcaggtaatccatggagagaagctgggactgcctgggttggccaccttcggctattccctcagtgggcagatggatgtggatgagaacttctacccagaccttctagtgggaagcctgtcagaccacattgtgctgctgcgggcccggccagtcatcaacatcgtccacaagaccttggtgcccaggccagctgtgctggaccctgcactttgcacggccacctcttgtgtgcaagtggagctgtgctttgcttacaaccagagtgccgggaaccccaactacaggcgaaacatcaccctggcctacactctggaggctgacagggaccgccggccgccccggctccgctttgccggcagtgagtccgctgtcttccacggcttcttctccatgcccgagatgcgctgccagaagctggagctgctcctgatggacaacctccgtgacaaactccgccccatcatcatctccatgaactactctttacctttgcggatgcccgatcgcccccggctggggctgcggtccctggacgcctacccgatcctcaaccaggcacaggctctggagaaccacactgaggtccagttccagaaggagtgcgggcctgacaacaagtgtgagagcaacttgcagatgcgggcagccttcgtgtcagagcagcagcagaagctgagcaggctccagtacagcagagacgtccggaaattgctcctgagcatcaacgtgacgaacacccggacctcggagcgctccggggaggacgcccacgaggcgctgctcaccctggtggtgcctcccgccctgctgctgtcctcagtgcgcccccccggggcctgccaagctaatgagaccatcttttgcgagctggggaaccccttcaaacggaaccagaggatggagctgctcatcgcctttgaggtcatcggggtgaccctgcacacaagggaccttcaggtgcagctgcagctctccacgtcgagtcaccaggacaacctgtggcccatgatcctcactctgctggtggactatacactccagacctcgcttagcatggtaaatcaccggctacaaagcttctttggggggacagtgatgggtgagtctggcatgaaaactgtggaggatgtaggaagccccctcaagtatgaattccaggtgggcccaatgggggaggggctggtgggcctggggaccctggtcctaggtctggagtggccctacgaagtcagcaatggcaagtggctgctgtatcccacggagatcaccgtccatggcaatgggtcctggccctgccgaccacctggagaccttatcaaccctctcaacctcactctttctgaccctggggacaggccatcatccccacagcgcaggcgccgacagctggatccagggggaggccagggccccccacctgtcactctggctgctgccaaaaaagccaagtctgagactgtgctgacctgtgccacagggcgtgcccactgtgtgtggctagagtgccccatccctgatgcccccgttgtcaccaacgtgactgtgaaggcacgagtgtggaacagcaccttcatcgaggattacagagactttgaccgagtccgggtaaatggctgggctaccctattcctccgaaccagcatccccaccatcaacatggagaacaagaccacgtggttctctgtggacattgactcggagctggtggaggagctgccggccgaaatcgagctgtggctggtgctggtggccgtgggtgcagggctgctgctgctggggctgatcatcctcctgctgtggaagtgcggcttcttcaagcgagcccgcactcgcgccctgtatgaagctaagaggcagaaggcggagatgaagagccagccgtcagagacagagaggctgaccgacgactactgagggggcagccccccgcccccggcccacctggtgtgacttctttaagcggacccgctattatcagatcatgcccaagtaccacgcagtgcggatccgggaggaggagcgctacccacctccagggagcaccctgcccaccaagaagcactgggtgaccagctggcagactcgggaccaatactactgacgtcctccctgatcccaccccctcctcccccagtgtcccctttcttcctatttatcataagttatgcctctgacagtccacaggggccaccacctttggctggtagcagcaggctcaggcacatacacctcgtcaagagcatgcacatgctgtctggccctggggatcttcccacaggagggccagcgctgtggaccttacaacgccgagtgcactgcattcctgtgccctagatgcacgtggggcccactgctcgtggactgtgctggtgcatcacggatggtgcatgggctcgccgtgtctcagcctctgccagcgccagcgccaaaacaagccaaagagcctcccaccagagccgggaggaaaaggcccctgcaatgtggtgacacctcccctttcacacctggatccatcttgagagccacagtcactggattgactttgctgtcaaaactactgacagggagcagcccccgggccgctggctggtgggcccccaattgacacccatgccagagaggtggggatcctgcctaaggttgtctacgggggcacttggaggacctggcgtgctcagacccaacagcaaaggaactagaaagaaggacccagaaggcttgctttcctgcatctctgtgaagcctctctccttggccacagactgaactcgcagggagtgcagcaggaaggaacaaagacaggcaaacggcaacgtagcctgggctcactgtgctggggcatggcgggatcctccacagagaggaggggaccaattctggacagacagatgttgggaggatacagaggagatgccacttctcactcaccactaccagccagcctccagaaggccccagagagaccctgcaagaccacggagggagccgacacttgaatgtagtaataggcagggggccctgccaccccatccagccagaccccagctgaaccatgcgtcaggggcctagaggtggagttcttagctatccttggctttctgtgccagcctggctctgcccctcccccatgggctgtgtcctaaggcccatttgagaagctgaggctagttccaaaaacctctcctgacccctgcctgttggcagcccactccccagccccagccccttccatggtactgtagcaggggaattccctccccctccttgtgccttctttgtatataggcttctcaccgcgaccaataaacagctcccagtttgt

SEQ ID NO: 1139 - DNA, 2780 bp; single-stranded, linear
  immediate source library: GENBANK
  immediate source clone: g186508
cgttgctgtcgctctgcacgcacctatgtggaaactaaagcccagagagaaagtctgacttgccccacagccagtgagtgactgcagcagcaccagaatctggtctgtttcctgtttggctcttctaccactacggcttgggatctcgggcatggtggctttgccaatggtccttgttttgctgctggtcctgagcagaggtgagagtgaattggacgccaagatcccatccacaggggatgccacagaatggcggaatcctcacctgtccatgctggggtcctgccagccagccccctcctgccagaagtgcatcctctcacaccccagctgtgcatggtgcaagcaactgaacttcaccgcgtcgggagaggcggaggcgcggcgctgcgcccgacgagaggagctgctggctcgaggctgcccgctggaggagctggaggagccccgcggccagcaggaggtgctgcaggaccagccgctcagccagggcgcccgcggagagggtgccacccagctggcgccgcagcgggtccgggtcacgctgcggcctggggagccccagcagctccaggtccgcttccttcgtgctgagggatacccggtggacctgtactaccttatggacctgagctactccatgaaggacgacctggaacgcgtgcgccagctcgggcacgctctgctggtccggctgcaggaagtcacccattctgtgcgcattggttttggttcctttgtggacaaaacggtgctgccctttgtgagcacagtaccctccaaactgcgccacccctgccccacccggctggagcgctgccagtcaccattcagctttcaccatgtgctgtccctgacgggggacgcacaagccttcgagcgggaggtggggcgccagagtgtgtccggcaatctggactcgcctgaaggtggcttcgatgccattctgcaggctgcactctgccaggagcagattggctggagaaatgtgtcccggctgctggtgttcacttcagacgacacattccatacagctggggacgggaagttgggcggcattttcatgcccagtgatgggcactgccacttggacagcaatggcctctacagtcgcagcacagagtttgactacccttctgtgggtcaggtagcccaggccctctctgcagcaaatatccagcccatctttgctgtcaccagtgccgcactgcctgtctaccaggagctgagtaaactgattcctaagtctgcagttggggagctgagtgaggactccagcaacgtggtacagctcatcatggatgcttataatagcctgtcttccaccgtgacccttgaacactcttcactccctcctggggtccacatttcttacgaatcccagtgtgagggtcctgagaagagggagggtaaggctgaggatcgaggacagtgcaaccacgtccgaatcaaccagacggtgactttctgggtttctctccaagccacccactgcctcccagagccccatctcctgaggctccgggcccttggcttctcagaggagctgattgtggagttgcacacgctgtgtgactgtaattgcagtgacacccagccccaggctccccactgcagtgatggccagggacacctacaatgtggtgtatgcagctgtgcccctggccgcctaggtcggctctgtgagtgctctgtggcagagctgtcctccccagacctggaatctgggtgccgggctcccaatggcacagggcccctgtgcagtggaaagggtcactgtcaatgtggacgctgcagctgcagtggacagagctctgggcatctgtgcgagtgtgacgatgccagctgtgagcgacatgagggcatcctctgcggaggctttggtcgctgccaatgtggagtatgtcactgtcatgccaaccgcacgggcagagcatgcgaatgcagtggggacatggacagttgcatcagtcccgagggagggctctgcagtgggcatggacgctgcaaatgcaaccgctgccagtgcttggacggctactatggtgctctatgcgaccaatgcccaggctgcaagacaccatgcgagagacaccgggactgtgcagagtgtggggccttcaggactggcccactggccaccaactgcagtacagcttgtgcccataccaatgtgaccctggccttggcccctatcttggatgatggctggtgcaaagagcggaccctggacaaccagctgttcttcttcttggtggaggatgacgccagaggcacggtcgtgctcagagtgagaccccaagaaaagggagcagaccacacgcaggccattgtgctgggctgcgtagggggcatcgtggcagtggggctggggctggtcctggcttaccggctctcggtggaaatctatgaccgccgggaatacagtcgctttgagaaggagcagcaacaactcaactggaagcaggacagtaatcctctctacaaaagtgccatcacgaccaccatcaatcctcgctttcaagaggcagacagtcccactctctgaaggagggagggacacttacccaaggctcttctccttggaggacagtgggaactggagggtgagaggaagggtgggtctgtaagaccttggtaggggactaattcactggcgaggtgcggccaccaccctacttcattttcagagtgacacccaagagggctgcttcccatgcctgcaaccttgcatccatctgggctaccccacccaagtatacaataaagtcttacctcag

SEQ ID NO: 1140 - DNA, 1510 bp; single-stranded, linear
  immediate source library: GENBANK
  immediate source clone: g186516
gtcaggatttaagtttacctcaaaaatggaagattttaacatggagagtgacagctttgaagatttctggaaaggtgaagatcttagtaattacagttacagctctaccctgcccccttttctactagatgccgccccatgtgaaccagaatccctggaaatcaacaagtattttgtggtcattatctatgccctggtattcctgctgagcctgctgggaaactccctcgtgatgctggtcatcttatacagcagggtcggccgctccgtcactgatgtctacctgctgaacctagccttggccgacctactctttgccctgaccttgcccatctgggccgcctccaaggtgaatggctggatttttggcacattcctgtgcaaggtggtctcactcctgaaggaagtcaacttctatagtggcatcctgctactggcctgcatcagtgtggaccgttacctggccattgtccatgccacacgcacactgacccagaagcgctacttggtcaaattcatatgtctcagcatctggggtctgtccttgctcctggccctgcctgtcttacttttccgaaggaccgtctactcatccaatgttagcccagcctgctatgaggacatgggcaacaatacagcaaactggcggatgctgttacggatcctgccccagtcctttggcttcatcgtgccactgctgatcatgctgttctgctacggattcaccctgcgtacgctgtttaaggcccacatggggcagaagcaccgggccatgcgggtcatctttgctgtcgtcctcatcttcctgctttgctggctgccctacaacctggtcctgctggcagacaccctcatgaggacccaggtgatccaggagacctgtgagcgccgcaatcacatcgaccgggctctggatgccaccgagattctgggcatccttcacagctgcctcaaccccctcatctacgccttcattggccagaagtttcgccatggactcctcaagattctagctatacatggcttgatcagcaaggactccctgcccaaagacagcaggccttcctttgttggctcttcttcagggcacacttccactactctctaagacctcctgcctaagtgcagcccgtggggttcctcccttctcttcacagtcacattccaagcctcatgtccactggttcttcttggtctcagtgtcaatgcagcccccattgtggtcacaggaagcagaggaggccacgttcttactagtttcccttgcatggtttagaaagcttgccctggtgcctcaccccttgccataattactatgtcatttgctggagctctgcccatcctgcccctgagcccatggcactctatgttctaagaagtgaaaatctacactccagtgagacagctctgcatactcattaggatggctagtatcaaaagaaagaaaatcaggctggccaacgggatgaaaccctgtctctactaaaaatacaaaaaaaaaaaaaaaaaa

SEQ ID NO: 1141 - DNA, 3281 bp; single-stranded, linear
  immediate source library: GENBANK
  immediate source clone: g186566
attaaacttcctcactgcaaccctaatcagagcccaaatggcgcagtgggaaatgctgcagaatcttgacagcccctttcaggatcagctgcaccagctttactcgcacagcctcctgcctgtggacattcgacagtacttggctgtctggattgaagaccagaactggcaggaagctgcacttgggagtgatgattccaaggctaccatgctattcttccacttcttggatcagctgaactatgagtgtggccgttgcagccaggacccagagtccttgttgctgcagcacaatttgcggaaattctgccgggacattcagcccttttcccaggatcctacccagttggctgagatgatctttaacctccttctggaagaaaaaagaattttgatccaggctcagagggcccaattggaacaaggagagccagttctcgaaacacctgtggagagccagcaacatgagattgaatcccggatcctggatttaagggctatgatggagaagctggtaaaatccatcagccaactgaaagaccagcaggatgtcttctgcttccgatataagatccaggccaaagggaagacaccctctctggacccccatcagaccaaagagcagaagattctgcaggaaactctcaatgaactggacaaaaggagaaaggaggtgctggatgcctccaaagcactgctaggccgattaactaccctaatcgagctactgctgccaaagttggaggagtggaaggcccagcagcaaaaagcctgcatcagagctcccattgaccacgggttggaacagctggagacatggttcacagctggagcaaagctgttgtttcacctgaggcagctgctgaaggagctgaagggactgagttgcctggttagctatcaggatgaccctctgaccaaaggggtggacctacgcaacgcccaggtcacagagttgctacagcgtctgctccacagagcctttgtggtagaaacccagccctgcatgccccaaactccccatcgacccctcatcctcaagactggcagcaagttcaccgtccgaacaaggctgctggtgagactccaggaaggcaatgagtcactgactgtggaagtctccattgacaggaatcctcctcaattacaaggcttccggaagttcaacattctgacttcaaaccagaaaactttgacccccgagaaggggcagagtcagggtttgatttgggactttggttacctgactctggtggagcaacgttcaggtggttcaggaaagggcagcaataaggggccactaggtgtgacagaggaactgcacatcatcagcttcacggtcaaatatacctaccagggtctgaagcaggagctgaaaacggacaccctccctgtggtgattatttccaacatgaaccagctctcaattgcctgggcttcagttctctggttcaatttgctcagcccaaaccttcagaaccagcagttcttctccaacccccccaaggccccctggagcttgctgggccctgctctcagttggcagttctcctcctatgttggccgaggcctcaactcagaccagctgagcatgctgagaaacaagctgttcgggcagaactgtaggactgaggatccattattgtcctgggctgacttcactaagcgagagagccctcctggcaagttaccattctggacatggctggacaaaattctggagttggtacatgaccacctgaaggatctctggaatgatggacgcatcatgggctttgtgagtcggagccaggagcgccggctgctgaagaagaccatgtctggcacctttctactgcgcttcagtgaatcgtcagaagggggcattacctgctcctgggtggagcaccaggatgatgacaaggtgctcatctactctgtgcaaccgtacacgaaggaggtgctgcagtcactcccgctgactgaaatcatccgccattaccagttgctcactgaggagaatatacctgaaaacccactgcgcttcctctatccccgaatcccccgggatgaagcttttgggtgctactaccaggagaaagttaatctccaggaacggaggaaatacctgaaacacaggctcattgtggtctctaatagacaggtggatgaactgcaacaaccgctggagcttaagccagagccagagctggagtcattagagctggaactagggctggtgccagagccagagctcagcctggacttagagccactgctgaaggcagggctggatctggggccagagctagagtctgtgctggagtccactctggagcctgtgatagagcccacactatgcatggtatcacaaacagtgccagagccagaccaaggacctgtatcacagccagtgccagagccagatttgccctgtgatctgagacatttgaacactgagccaatggaaatcttcagaaactgtgtaaagattgaagaaatcatgccgaatggtgacccactgttggctggccagaacaccgtggatgaggtttacgtctcccgccccagccacttctacactgatggacccttgatgccttctgacttctaggaaccacatttcctctgttcttttcatatctctttgcccttcctactcctcatagcatgatattgttctccaaggatgggaatcaggcatgtgtcccttccaagctgtgttaactgttcaaactcaggcctgtgtgactccattggggtgagaggtgaaagcataacatgggtacagaggggacaacaatgaatcagaacagatgctgagccataggtctaaataggatcctggaggctgcctgctgtgctgggaggtataggggtcctgggggcaggccagggcagttgacaggtacttggagggctcagggcagtggcttctttccagtatggaaggatttcaacattttaatagttggttaggctaaactggtgcatactggcattggccttggtggggagcacagacacaggataggactccatttctttcttccattccttcatgtctaggataacttgctttcttctttcctttactcctggctcaagccctgaatttcttcttttcctgcaggggttgagagctttctgccttagcctaccatgtgaaactctaccctgaagaaagggatggataggaagtagacctctttttcttaccagtctcctcccctactctgccccctaagctggctgtacctgttcctcccccataaaatgatcctgccaatctaaaaaaaaaa

SEQ ID NO: 1142 - DNA, 3970 bp; single-stranded, linear
  immediate source library: GENBANK
  immediate source clone: g186567
attaaacctctcgccgagcccctccgcagactctgcgccggaaagtttcatttgctgtatgccatcctcgagagctgtctaggttaacgttcgcactctgtgtatataacctcgacagtcttggcacctaacgtgctgtgcgtagctgctcctttggttgaatccccaggcccttgttggggcacaaggtggcaggatgtctcagtggtacgaacttcagcagcttgactcaaaattcctggagcaggttcaccagctttatgatgacagttttcccatggaaatcagacagtacctggcacagtggttagaaaagcaagactgggagcacgctgccaatgatgtttcatttgccaccatccgttttcatgacctcctgtcacagctggatgatcaatatagtcgcttttctttggagaataacttcttgctacagcataacataaggaaaagcaagcgtaatcttcaggataattttcaggaagacccaatccagatgtctatgatcatttacagctgtctgaaggaagaaaggaaaattctggaaaacgcccagagatttaatcaggctcagtcggggaatattcagagcacagtgatgttagacaaacagaaagagcttgacagtaaagtcagaaatgtgaaggacaaggttatgtgtatagagcatgaaatcaagagcctggaagatttacaagatgaatatgacttcaaatgcaaaaccttgcagaacagagaacacgagaccaatggtgtggcaaagagtgatcagaaacaagaacagctgttactcaagaagatgtatttaatgcttgacaataagagaaaggaagtagttcacaaaataatagagttgctgaatgtcactgaacttacccagaatgccctgattaatgatgaactagtggagtggaagcggagacagcagagcgcctgtattggggggccgcccaatgcttgcttggatcagctgcagcaagttcggcagcagcttaaaaagttggaggaattggaacagaaatacacctacgaacatgaccctatcacaaaaaacaaacaagtgttatgggaccgcaccttcagtcttttccagcagctcattcagagctcgtttgtggtggaaagacagccctgcatgccaacgcaccctcagaggccgctggtcttgaagacaggggtccagttcactgtgaagttgagactgttggtgaaattgcaagagctgaattataatttgaaagtcaaagtcttatttgataaagatgtgaatgagagaaatacagtaaaaggatttaggaagttcaacattttgggcacgcacacaaaagtgatgaacatggaggagtccaccaatggcagtctggcggctgaatttcggcacctgcaattgaaagaacagaaaaatgctggcaccagaacgaatgagggtcctctcatcgttactgaagagcttcactcccttagttttgaaacccaattgtgccagcctggtttggtaattgacctcgagacgacctctctgcccgttgtggtgatctccaacgtcagccagctcccgagcggttgggcctccatcctttggtacaacatgctggtggcggaacccaggaatctgtccttcttcctgactccaccatgtgcacgatgggctcagctttcagaagtgctgagttggcagttttcttctgtcaccaaaagaggtctcaatgtggaccagctgaacatgttgggagagaagcttcttggtcctaacgccagccccgatggtctcattccgtggacgaggttttgtaaggaaaatataaatgataaaaattttcccttctggctttggattgaaagcatcctagaactcattaaaaaacacctgctccctctctggaatgatgggtgcatcatgggcttcatcagcaaggagcgagagcgtgccctgttgaaggaccagcagccggggaccttcctgctgcggttcagtgagagctcccgggaaggggccatcacattcacatgggtggagcggtcccagaacggaggcgaacctgacttccatgcggttgaaccctacacgaagaaagaactttctgctgttactttccctgacatcattcgcaattacaaagtcatggctgctgagaatattcctgagaatcccctgaagtatctgtatccaaatattgacaaagaccatgcctttggaaagtattactccaggccaaaggaagcaccagagccaatggaacttgatggccctaaaggaactggatatatcaagactgagttgatttctgtgtctgaagttcacccttctagacttcagaccacagacaacctgctccccatgtctcctgaggagtttgacgaggtgtctcggatagtgggctctgtagaattcgacagtatgatgaacacagtatagagcatgaatttttttcatcttctctggcgacagttttccttctcatctgtgattccctcctgctactctgttccttcacatcctgtgtttctagggaaatgaaagaaaggccagcaaattcgctgcaacctgttgatagcaagtgaatttttctctaactcagaaacatcagttactctgaagggcatcatgcatcttactgaaggtaaaattgaaaggcattctctgaagagtgggtttcacaagtgaaaaacatccagatacacccaaagtatcaggacgagaatgagggtcctttgggaaaggagaagttaagcaacatctagcaaatgttatgcataaagtcagtgcccaactgttataggttgttggataaatcagtggttatttagggaactgcttgacgtaggaacggtaaatttctgtgggagaattcttacatgttttctttgctttaagtgtaactggcagttttccattggtttacctgtgaaatagttcaaagccaagtttatatacaattatatcagtcctctttcaaaggtagccatcatggatctggtagggggaaaatgtgtattttattacatctttcacattggctatttaaagacaaagacaaattctgtttcttgagaagagaatattagctttactgtttgttatggcttaatgacactagctaatatcaatagaaggatgtacatttccaaattcacaagttgtgtttgatatccaaagctgaatacattctgctttcatcttggtcacatacaattatttttacagttctcccaagggagttaggctattcacaaccactcattcaaaagttgaaattaaccatagatgtagataaactcagaaatttaattcatgtttcttaaatgggctactttgtcctttttgttattagggtggtatttagtctattagccacaaaattgggaaaggagtagaaaaagcagtaactgacaacttgaataatacaccagagataatatgagaatcagatcatttcaaaactcatttcctatgtaactgcattgagaactgcatatgtttcgctgatatatgtgtttttcacatttgcgaatggttccattctctctcctgtactttttccagacacttttttgagtggatgatgtttcgtgaagtatactgtatttttacctttttccttccttatcactgacacaaaaagtagattaagagatgggtttgacaaggttcttcccttttacatactgctgtctatgtggctgtatcttgtttttccactactgctaccacaactatattatcatgcaaatgctgtattcttctttggtggagataaagatttcttgagttttgttttaaaattaaagctaaagtatctgtattgcattaaatataatatcgacacagtgctttccgtggcactgcatacaatctgaggcctcctctctcagtttttatatagatggcgagaacctaagtttcagttgattttacaattgaaatgactaaaaaacaaagaagacaacattaaaaacaatattgtttcta

SEQ ID NO: 1143 - DNA, 3622 bp; single-stranded, linear
  immediate source library: GENBANK
  immediate source clone: g186624
cccggggaggggaccggggaacagagggccgagaggcgtgcggcaggggggagggtaggagaaagaagggcccgactgtaggagggcagcggagcattacctcatcccgtgagcctccgcgggcccagagaagaatcttctagggtggagtctccatggtgacgggcgggcccgcccccctgagagcgacgcgagccaatgggaaggccttggggtgacatcatgggctatttttaggggttgactggtagcagataagtgttgagctcgggctggataagggctcagagttgcactgagtgtggctgaagcagcgaggcgggagtggaggtgcgcggagtcaggcagacagacagacacagccagccagccaggtcggcagtatagtccgaactgcaaatcttattttcttttcaccttctctctaactgcccagagctagcgcctgtggctcccgggctggtggttcgggagtgtccagagagccttgtctccagccggccccgggaggagagccctgctgcccaggcgctgttgacagcggcggaaagcagcggtaccccacgcgcccgccgggggacgtcggcgagcggctgcagcagcaaagaactttcccggcggggaggaccggagacaagtggcagagtcccggagcgaacttttgcaagcctttcctgcgtcttaggcttctccacggcggtaaagaccagaaggcggcggagagccacgcaagagaagaaggacgtgcgctcagcttcgctcgcaccggttgttgaacttgggcgagcgcgagccgcggctgccgggcgccccctccccctagcagcggaggaggggacaagtcgtcggagtccgggcggccaagacccgccgccggccggccactgcagggtccgcactgatccgctccgcggggagagccgctgctctgggaagtgagttcgcctgcggactccgaggaaccgctgcgcccgaagagcgctcagtgagtgaccgcgacttttcaaagccgggtagcgcgcgcgagtcgacaagtaagagtgcgggaggcatcttaattaaccctgcgctccctggagcgagctggtgaggagggcgcagcggggacgacagccagcgggtgcgtgcgctcttagagaaactttccctgtcaaaggctccggggggcgcgggtgtcccccgcttgccagagccctgttgcggccccgaaacttgtgcgcgcacgccaaactaacctcacgtgaagtgacggactgttctatgactgcaaagatggaaacgaccttctatgacgatgccctcaacgcctcgttcctcccgtccgagagcggaccttatggctacagtaaccccaagatcctgaaacagagcatgaccctgaacctggccgacccagtggggagcctgaagccgcacctccgcgccaagaactcggacctcctcacctcgcccgacgtggggctgctcaagctggcgtcgcccgagctggagcgcctgataatccagtccagcaacgggcacatcaccaccacgccgacccccacccagttcctgtgccccaagaacgtgacagatgagcaggaggggttcgccgagggcttcgtgcgcgccctggccgaactgcacagccagaacacgctgcccagcgtcacgtcggcggcgcagccggtcaacggggcaggcatggtggctcccgcggtagcctcggtggcagggggcagcggcagcggcggcttcagcgccagcctgcacagcgagccgccggtctacgcaaacctcagcaacttcaacccaggcgcgctgagcagcggcggcggggcgccctcctacggcgcggccggcctggcctttcccgcgcaaccccagcagcagcagcagccgccgcaccacctgccccagcagatgcccgtgcagcacccgcggctgcaggccctgaaggaggagcctcagacagtgcccgagatgcccggcgagacaccgcccctgtcccccatcgacatggagtcccaggagcggatcaaggcggagaggaagcgcatgaggaaccgcatcgctgcctccaagtgccgaaaaaggaagctggagagaatcgcccggctggaggaaaaagtgaaaaccttgaaagctcagaactcggagctggcgtccacggccaacatgctcagggaacaggtggcacagcttaaacagaaagtcatgaaccacgttaacagtgggtgccaactcatgctaacgcagcagttgcaaacattttgaagagagaccgtcgggggctgaggggcaacgaagaaaaaaaataacacagagagacagacttgagaacttgacaagttgcgacggagagaaaaaagaagtgtccgagaactaaagccaagggtatccaagttggactgggttcggtctgacggcgcccccagtgtgcacgagtgggaaggacttggtcgcgccctcccttggcgtggagccagggagcggccgcctgcgggctgccccgctttgcggacgggctgtccccgcgcgaacggaacgttggactttcgttaacattgaccaagaactgcatggacctaacattcgatctcattcagtattaaaggggggagggggagggggttacaaactgcaatagagactgtagattgcttctgtagtactccttaagaacacaaagcggggggagggttggggaggggcggcaggagggaggtttgtgagagcgaggctgagcctacagatgaactctttctggcctgctttcgttaactgtgtatgtacatatatatattttttaatttgattaaagctgattactgtcaataaacagcttcatgcctttgtaagttatttcttgtttgtttgtttgggtatcctgcccagtgttgtttgtaaataagagatttggagcactctgagtttaccatttgtaataaagtatataatttttttatgttttgtttctgaaaattccagaaaggatatttaagaaaatacaataaactattggaaagtactcccctaacctcttttctgcatcatctgtagatcctagtctatctaggtggagttgaaagagttaagaatgctcgataaaatcactctcagtgcttcttactattaagcagtaaaaactgttctctattagacttagaaataaatgtacctgatgtacctgatgctatgtcaggcttcatactccacgctcccccagcgtatctatatggaattgcttaccaaaggctagtgcgatgtttcaggaggctggaggaaggggggttgcagtggagagggacagcccactgagaagtcaaacatttcaaagtttggattgcatcaagtggcatgtgctgtgaccatttataatgttagaaattttacaataggtgcttattctcaaagcaggaattggtggcagattttacaaaagatgtatccttccaatttggaatcttctctttgacaattcctagataaaaagatggcctttgtcttatgaatatttataacagcattctgtcacaataaatgtattcaaataccaataacagatcttgaattgcttccctttactacttttttgttcccaagttatatactgaagtttttatttttagttgctgaggtt

SEQ ID NO: 1144 - DNA, 2136 bp; single-stranded, linear
  immediate source library: GENBANK
  immediate source clone: g186626
cgcgagccgcctcctccccttccccacgctcgaggaggggggcgcgggggcccggctccggcgacggccaatcggagcgcacttccgtggctgactagcgcggtataaaggcgtgtggctcaggctgagcggctgggaccttgagagcggccaggccagcctcggagccagcagggagctgggagctgggggaaacgacgccaggaaagctatcgcgccagagagggcgacgggggctcgggaagcctgacagggcttttgcgcacagctgccggctggctgctacccgcccgcgccagcccccgagaacgcgcgaccaggcacccagtccggtcaccgcagcggagagctcgccgctcgctgcagcgaggcccggagcggccccgcagggaccctccccagaccgcctgggccgcccggatgtgcactaaaatggaacagcccttctaccacgacgactcatacacagctacgggatacggccgggcccctggtggcctctctctacacgactacaaactcctgaaaccgagcctggcggtcaacctggccgacccctaccggagtctcaaagcgcctggggctcgcggacccggcccagagggcggcggtggcggcagctacttttctggtcagggctcggacaccggcgcgtctctcaagctcgcctcttcggagctggaacgcctgattgtccccaacagcaacggcgtgatcacgacgacgcctacacccccgggacagtacttttacccccgcgggggtggcagcggtggaggtgcagggggcgcagggggcggcgtcaccgaggagcaggagggcttcgccgacggctttgtcaaagccctggacgatctgcacaagatgaaccacgtgacaccccccaacgtgtccctgggcgctaccggggggcccccggctgggcccgggggcgtctacgccggcccggagccacctcccgtttacaccaacctcagcagctactccccagcctctgcgtcctcgggaggcgccggggctgccgtcgggaccgggagctcgtacccgacgaccaccatcagctacctcccacacgcgccgcccttcgccggtggccacccggcgcagctgggcttgggccgcggcgcctccaccttcaaggaggaaccgcagaccgtgccggaggcgcgcagccgggacgccacgccgccggtgtcccccatcaacatggaagaccaagagcgcatcaaagtggagcgcaagcggctgcggaaccggctggcggccaccaagtgccggaagcggaagctggagcgcatcgcgcgcctggaggacaaggtgaagacgctcaaggccgagaacgcggggctgtcgagtaccgccggcctcctccgggagcaggtggcccagctcaaacagaaggtcatgacccacgtcagcaacggctgtcagctgctgcttggggtcaagggacacgccttctgaacgtcccctgcccctttacggacaccccctcgcttggacggctgggcacacgcctcccactggggtccagggagcaggcggtgggcacccaccctgggacctaggggcgccgcaaaccacactggactccggccctcctaccctgcgcccagtccttccacctcgacgtttacaagcccccccttccacttttttttgtatgttttttttctgctggaaacagactcgattcatattgaatataatatatttgtgtatttaacagggaggggaagagggggcgatcgcggcggagctggccccgccgcctggtactcaagcccgcggggacattgggaaggggacccccgccccctgccctcccctctctgcaccgtactgtggaaaagaaacacgcacttagtctctaaagagtttattttaagacgtgtttgtgtttgtgtgtgtttgttctttttattgaatctatttaagtaaaaaaaaaattggttctttattaatttctgttgtctttttttccaagctgggagggcggggggaaaaaaaaagcactggtttgcccccagctcagtgctgttggtggctcggtcctgtatgtgtccccctcgtcggttcggcgcaggcatcttgtggtcccagcccaggagtcccacccttcccgcgtccccagat

SEQ ID NO: 1145 - DNA, 5775 bp; single-stranded, linear
  immediate source library: GENBANK
  immediate source clone: g186763
tcctaggcggcggccgcggcggcggaggcagcagcggcggcggcagtggcggcggcgaaggtggcggcggctcggccagtactcccggcccccgccatttcggactgggagcgagcgcggcgcaggcactgaaggcggcggcggggccagaggctcagcggctcccaggtgcgggagagaggcctgctgaaaatgactgaatataaacttgtggtagttggagcttgtggcgtaggcaagagtgccttgacgatacagctaattcagaatcattttgtggacgaatatgatccaacaatagaggattcctacaggaagcaagtagtaattgatggagaaacctgtctcttggatattctcgacacagcaggtcaagaggagtacagtgcaatgagggaccagtacatgaggactggggagggctttctttgtgtatttgccataaataatactaaatcatttgaagatattcaccattatagagaacaaattaaaagagttaaggactctgaagatgtacctatggtcctagtaggaaataaatgtgatttgccttctagaacagtagacacaaaacaggctcaggacttagcaagaagttatggaattccttttattgaaacatcagcaaagacaagacagggtgttgatgatgccttctatacattagttcgagaaattcgaaaacataaagaaaagatgagcaaagatggtaaaaagaagaaaaagaagtcaaagacaaagtgtgtaattatgtaaatacaatttgtacttttttcttaaggcatactagtacaagtggtaatttttgtacattacactaaattattagcatttgttttagcattacctaatttttttcctgctccatgcagactgttagcttttaccttaaatgcttattttaaaatgacagtggaagtttttttttcctcgaagtgccagtattcccagagttttggtttttgaactagcaatgcctgtgaaaaagaaactgaatacctaagatttctgtcttggggtttttggtgcatgcagttgattacttcttatttttcttaccaagtgtgaatgttggtgtgaaacaaattaatgaagcttttgaatcatccctattctgtgttttatctagtcacataaatggattaattactaatttcagttgagaccttctaattggtttttactgaaacattgagggacacaaatttatgggcttcctgatgatgattcttctaggcatcatgtcctatagtttgtcatccctgatgaatgtaaagttacactgttcacaaaggttttgtctcctttccactgctattagtcatggtcactctccccaaaatattatattttttctataaaaagaaaaaaatggaaaaaaattacaaggcaatggaaactattataaggccatttccttttcacattagataaattactataaagactcctaatagctttttcctgttaaggcagacccagtatgaatgggattattatagcaaccattttggggctatatttacatgctactaaatttttataataattgaaaagattttaacaagtataaaaaaattctcataggaattaaatgtagtctccctgtgtcagactgctctttcatagtataactttaaatcttttcttcaacttgagtctttgaagatagttttaattctgcttgtgacattaaaagattatttgggccagttatagcttattaggtgttgaagagaccaaggttgcaagccaggccctgtgtgaaccttgagctttcatagagagtttcacagcatggactgtgtgccccacggtcatccgagtggttgtacgatgcattggttagtcaaaaatggggagggactagggcagtttggatagctcaacaagatacaatctcactctgtggtggtcctgctgacaaatcaagagcattgcttttgtttcttaagaaaacaaactcttttttaaaaattacttttaaatattaactcaaaagttgagattttggggtggtggtgtgccaagacattaattttttttttaaacaatgaagtgaaaaagttttacaatctctaggtttggctagttctcttaacactggttaaattaacattgcataaacacttttcaagtctgatccatatttaataatgctttaaaataaaaataaaaacaatccttttgataaatttaaaatgttacttattttaaaataaatgaagtgagatggcatggtgaggtgaaagtatcactggactaggttgttggtgacttaggttctagataggtgtcttttaggactctgattttgaggacatcacttactatccatttcttcatgttaaaagaagtcatctcaaactcttagttttttttttttacactatgtgatttatattccatttacataaggatacacttatttgtcaagctcagcacaatctgtaaatttttaacctatgttacaccatcttcagtgccagtcttgggcaaaattgtgcaagaggtgaagtttatatttgaatatccattctcgttttaggactcttcttccatattagtgtcatcttgcctccctaccttccacatgccccatgacttgatgcagttttaatacttgtaattcccctaaccataagatttactgctgctgtggatatctccatgaagttttcccactgagtcacatcagaaatgccctacatcttattttcctcagggctcaagagaatctgacagataccataaagggatttgacctaatcactaattttcaggtggtggctgatgctttgaacatctctttgctgcccaatccattagcgacagtaggatttttcaaccctggtatgaatagacagaaccctatccagtggaaggagaatttaataaagatagtgcagaaagaattccttaggtaatctataactaggactactcctggtaacagtaatacattccattgttttagtaaccagaaatcttcatgcaatgaaaaatactttaattcatgaagcttacttttttttttttggtgtcagagtctcgctcttgtcacccaggctggaatgcagtggcgccatctcagctcactgcaaccttccatcttcccaggttcaagcgattctcgtgcctcggcctcctgagtagctgggattacaggcgtgtgcactacactcaactaatttttgtatttttaggagagacggggtttcacctgttggccaggctggtctcgaactcctgacctcaagtgattcacccaccttggcctcataaacctgttttgcagaactcatttattcagcaaatatttattgagtgcctaccagatgccagtcaccgcacaaggcactgggtatatggtatccccaaacaagagacataatcccggtccttaggtactgctagtgtggtctgtaatatcttactaaggcctttggtatacgacccagagataacacgatgcgtattttagttttgcaaagaaggggtttggtctctgtgccagctctataattgttttgctacgattccactgaaactcttcgatcaagctactttatgtaaatcacttcattgttttaaaggaataaacttgattatattgtttttttatttggcataactgtgattcttttaggacaattactgtacacattaaggtgtatgtcagatattcatattgacccaaatgtgtaatattccagttttctctgcataagtaattaaaatatacttaaaaattaatagttttatctgggtacaaataaacagtgcctgaactagttcacagacaagggaaacttctatgtaaaaatcactatgatttctgaattgctatgtgaaactacagatctttggaacactgtttaggtagggtgttaagacttgacacagtacctcgtttctacacagagaaagaaatggccatacttcaggaactgcagtgcttatgaggggatatttaggcctcttgaatttttgatgtagatgggcatttttttaaggtagtggttaattacctttatgtgaactttgaatggtttaacaaaagatttgtttttgtagagattttaaagggggagaattctagaaataaatgttacctaattattacagccttaaagacaaaaatccttgttgaagtttttttaaaaaaagactaaattacatagacttaggcattaacatgtttgtggaagaatatagcagacgtatattgtatcatttgagtgaatgttcccaagtaggcattctaggctctatttaactgagtcacactgcataggaatttagaacctaacttttataggttatcaaaactgttgtcaccattgcacaattttgtcctaatatatacatagaaactttgtggggcatgttaagttacagtttgcacaagttcatctcatttgtattccattgatttttttttttcttctaaacattttttcttcaaaacagtatatataactttttttaggggattttttttagacagcaaaaaactatctgaagatttccatttgtcaaaaagtaatgatttcttgataattgtgtagtgaatgttttttagaacccagcagttaccttgaaagctgaatttatatttagtaacttctgtgttaatactggatagcatgaattctgcattgagaaactgaatagctgtcataaaatgctttctttcctaaagaaagatactcacatgagttcttgaagaatagtcataactagattaagatctgtgttttagtttaatagtttgaagtgcctgtttgggataatgataggtaatttagatgaatttaggggaaaaaaaagttatctgcagttatgttgagggcccatctctccccccacacccccacagagctaactgggttacagtgttttatccgaaagtttccaattccactgtcttgtgttttcatgttgaaaatacttttgcatttttcctttgagtgccaatttcttactagtactatttcttaatgtaacatgtttacctggcctgtcttttaactatttttgtatagtgtaaactgaaacatgcacattttgtacattgtgctttcttttgtgggtcatatgcagtgtgatccagttgttttccatcatttggttgcgctgacctaggaatgttggtcatatcaaacattaaaaatgaccactcttttaatgaaattaacttttaaatgtttataggagtatgtgctgtgaagtgatctaaaatttgtaatatttttgtcatgaactgtactactcctaattattgtaatgtaataaaaatagttacagtgactatgagtgtgtatttattcatgcaaatttgaactgtttgccccgaaatggatatggatactttataagccatagacactatagtataccagtgaatcttttatgcagcttgttagaagtatccttttattttctaaaaggtgctgtggatattatgtaaaggcgtgtttgcttaaacaattttccatatttagaagtagatgcaaaacaaatctgcctttatgacaaaaaaataggataacattatttatttatttccttttatcaataaggtaattgatacacaacaggtgacttggttttaggcccaaaggtagcagcagcaacattaataatggaaataattgaatagttagttatgtatgttaatgccagtcaccagcaggctatttcaaggtcagaagtaatgactccatacatattatttatttctataactacatttaaatcattaccagg

SEQ ID NO: 1146 - DNA, 2776 bp; single-stranded, linear
  immediate source library: GENBANK
  immediate source clone: g186933
cagggcagactggtagcaaagcccccacgcccagccaggagcaccgccgcggactccagcacaccgagggacatgctgggcctgcgccccccactgctcgccctggtggggctgctctccctcgggtgcgtcctctctcaggagtgcacgaagttcaaggtcagcagctgccgggaatgcatcgagtcggggcccggctgcacctggtgccagaagctgaacttcacagggccgggggatcctgactccattcgctgcgacacccggccacagctgctcatgaggggctgtgcggctgacgacatcatggaccccacaagcctcgctgaaacccaggaagaccacaatgggggccagaagcagctgtccccacaaaaagtgacgctttacctgcgaccaggccaggcagcagcgttcaacgtgaccttccggcgggccaagggctaccccatcgacctgtactatctgatggacctctcctactccatgcttgatgacctcaggaatgtcaagaagctaggtggcgacctgctccgggccctcaacgagatcaccgagtccggccgcattggcttcgggtccttcgtggacaagaccgtgctgccgttcgtgaacacgcaccctgataagctgcgaaacccatgccccaacaaggagaaagagtgccagcccccgtttgccttcaggcacgtgctgaagctgaccaacaactccaaccagtttcagaccgaggtcgggaagcagctgatttccggaaacctggatgcacccgagggtgggctggacgccatgatgcaggtcgccgcctgcccggaggaaatcggctggcgcaacgtcacgcggctgctggtgtttgccactgatgacggcttccatttcgcgggcgacggaaagctgggcgccatcctgacccccaacgacggccgctgtcacctggaggacaacttgtacaagaggagcaacgaattcgactacccatcggtgggccagctggcgcacaagctggctgaaaacaacatccagcccatcttcgcggtgaccagtaggatggtgaagacctacgagaaactcaccgagatcatccccaagtcagccgtgggggagctgtctgaggactccagcaatgtggtccatctcattaagaatgcttacaataaactctcctccagggtcttcctggatcacaacgccctccccgacaccctgaaagtcacctacgactccttctgcagcaatggagtgacgcacaggaaccagcccagaggtgactgtgatggcgtgcagatcaatgtcccgatcaccttccaggtgaaggtcacggccacagagtgcatccaggagcagtcgtttgtcatccgggcgctgggcttcacggacatagtgaccgtgcaggttcttccccagtgtgagtgccggtgccgggaccagagcagagaccgcagcctctgccatggcaagggcttcttggagtgcggcatctgcaggtgtgacactggctacattgggaaaaactgtgagtgccagacacagggccggagcagccaggagctggaaggaagctgccggaaggacaacaactccatcatctgctcagggctgggggactgtgtctgcgggcagtgcctgtgccacaccagcgacgtccccggcaagctgatatacgggcagtactgcgagtgtgacaccatcaactgtgagcgctacaacggccaggtctgcggcggcccggggagggggctctgcttctgcgggaagtgccgctgccacccgggctttgagggctcagcgtgccagtgcgagaggaccactgagggctgcctgaacccgcggcgtgttgagtgtagtggtcgtggccggtgccgctgcaacgtatgcgagtgccattcaggctaccagctgcctctgtgccaggagtgccccggctgcccctcaccctgtggcaagtacatctcctgcgccgagtgcctgaagttcgaaaagggcccctttgggaagaactgcagcgcggcgtgtccgggcctgcagctgtcgaacaaccccgtgaagggcaggacctgcaaggagagggactcagagggctgctgggtggcctacacgctggagcagcaggacgggatggaccgctacctcatctatgtggatgagagccgagagtgtgtggcaggccccaacatcgccgccatcgtcgggggcaccgtggcaggcatcgtgctgatcggcattctcctgctggtcatctggaaggctctgatccacctgagcgacctccgggagtacaggcgctttgagaaggagaagctcaagtcccagtggaacaatgataatccccttttcaagagcgccaccacgacggtcatgaaccccaagtttgctgagagttaggagcacttggtgaagacaaggccgtcaggacccaccatgtctgccccatcacgcggccgagacatggcttggccacagctcttgaggatgtcaccaattaaccagaaatccagttattttccgccctcaaaatgacagccatggccggccggtgcttctgggggctcgtcggggggacagctccactctgactggcacagtctttgcatggagacttgaggagggcttgaggttggtgaggttaggtgcgtgtttcctgtgcaagtcaggacatcagtctgattaaaggtggtgccaatttatttacatttaaacttgtcagggtataaaatgacatcccattaattatattgttaatcaatcacgtgtatagaaaaaaaaataaaacttcaat

SEQ ID NO: 1147 - DNA, 3595 bp; single-stranded, linear
  immediate source library: GENBANK
  immediate source clone: g186935
tggcttccttgtggttcctcagtggtgcctgcaacccctggttcacctccttccaggttctggctccttccagccatggctctcagagtccttctgttaacagccttgaccttatgtcatgggttcaacttggacactgaaaacgcaatgaccttccaagagaacgcaaggggcttcgggcagagcgtggtccagcttcagggatccagggtggtggttggagccccccaggagatagtggctgccaaccaaaggggcagcctctaccagtgcgactacagcacaggctcatgcgagcccatccgcctgcaggtccccgtggaggccgtgaacatgtccctgggcctgtccctggcagccaccaccagcccccctcagctgctggcctgtggtcccaccgtgcaccagacttgcagtgagaacacgtatgtgaaagggctctgcttcctgtttggatccaacctacggcagcagccccagaagttcccagaggccctccgagggtgtcctcaagaggatagtgacattgccttcttgattgatggctctggtagcatcatcccacatgactttcggcggatgaaggagtttgtctcaactgtgatggagcaattaaaaaagtccaaaaccttgttctctttgatgcagtactctgaagaattccggattcactttaccttcaaagagttccagaacaaccctaacccaagatcactggtgaagccaataacgcagctgcttgggcggacacacacggccacgggcatccgcaaagtggtacgagagctgtttaacatcaccaacggagcccgaaagaatgcctttaagatcctagttgtcatcacggatggagaaaagtttggcgatcccttgggatatgaggatgtcatccctgaggcagacagagagggagtcattcgctacgtcattggggtgggagatgccttccgcagtgagaaatcccgccaagagcttaataccatcgcatccaagccgcctcgtgatcacgtgttccaggtgaataactttgaggctctgaagaccattcagaaccagcttcgggagaagatctttgcgatcgagggtactcagacaggaagtagcagctcctttgagcatgagatgtctcaggaaggcttcagcgctgccatcacctctaatggccccttgctgagcactgtggggagctatgactgggctggtggagtctttctatatacatcaaaggagaaaagcaccttcatcaacatgaccagagtggattcagacatgaatgatgcttacttgggttatgctgccgccatcatcttacggaaccgggtgcaaagcctggttctgggggcacctcgatatcagcacatcggcctggtagcgatgttcaggcagaacactggcatgtgggagtccaacgctaatgtcaagggcacccagatcggcgcctacttcggggcctccctctgctccgtggacgtggacagcaacggcagcaccgacctggtcctcatcggggccccccattactacgagcagacccgagggggccaggtgtccgtgtgccccttgcccagggggagggctcggtggcagtgtgatgctgttctctacggggagcagggccaaccctggggccgctttggggcagccctaacagtgctgggggacgtaaatggggacaagctgacggacgtggccattggggccccaggagaggaggacaaccggggtgctgtttacctgtttcacggaacctcaggatctggcatcagcccctcccatagccagcggatagcaggctccaagctctctcccaggctccagtattttggtcagtcactgagtgggggccaggacctcacaatggatggactggtagacctgactgtaggagcccaggggcacgtgctgctgctcaggtcccagccagtactgagagtcaaggcaatcatggagttcaatcccagggaagtggcaaggaatgtatttgagtgtaatgatcaggtggtgaaaggcaaggaagccggagaggtcagagtctgcctccatgtccagaagagcacacgggatcggctaagagaaggacagatccagagtgttgtgacttatgacctggctctggactccggccgcccacattcccgcgccgtcttcaatgagacaaagaacagcacacgcagacagacacaggtcttggggctgacccagacttgtgagaccctgaaactacagttgccgaattgcatcgaggacccagtgagccccattgtgctgcgcctgaacttctctctggtgggaacgccattgtctgctttcgggaacctccggccagtgctggcggaggatgctcagagactcttcacagccttgtttccctttgagaagaattgtggcaatgacaacatctgccaggatgacctcagcatcaccttcagtttcatgagcctggactgcctcgtggtgggtgggccccgggagttcaacgtgacagtgactgtgagaaatgatggtgaggactcctacaggacacaggtcaccttcttcttcccgcttgacctgtcctaccggaaggtgtccacactccagaaccagcgctcacagcgatcctggcgcctggcctgtgagtctgcctcctccaccgaagtgtctggggccttgaagagcaccagctgcagcataaaccaccccatcttcccggaaaactcagaggtcacctttaatatcacgtttgatgtagactctaaggcttcccttggaaacaaactgctcctcaaggccaatgtgaccagtgagaacaacatgcccagaaccaacaaaaccgaattccaactggagctgccggtgaaatatgctgtctacatggtggtcaccagccatggggtctccactaaatatctcaacttcacggcctcagagaataccagtcgggtcatgcagcatcaatatcaggtcagcaacctggggcagaggagcccccccatcagcctggtgttcttggtgcccgtccggctgaaccagactgtcatatgggaccgcccccaggtcaccttctccgagaacctctcgagtacgtgccacaccaaggagcgcttgccctctcactccgactttctggctgagcttcggaaggcccccgtggtgaactgctccatcgctgtctgccagagaatccagtgtgacatcccgttctttggcatccaggaagaattcaatgctaccctcaaaggcaacctctcgtttgactggtacatcaagacctcgcataaccacctcctgatcgtgagcacagctgagatcttgtttaacgattccgtgttcaccctgctgccgggacagggggcgtttgtgaggtcccagacggagaccaaagtggagccgttcgaggtccccaaccccctgccgctcatcgtgggcagctctgtcgggggactgctgctcctggccctcatcaccgccgcgctgtacaagctcggcttcttcaagcggcaatacaaggacatgatgagtgaagggggtcccccgggggccgaaccccagtagcggctccttcccgacagagctgcctctcggtggccagcaggactctgcccagaccacacgt

SEQ ID NO: 1148 - DNA, 1431 bp; single-stranded, linear
  immediate source library: GENBANK
  immediate source clone: g186965
atgggggccttggcaagagccctgccgtccatactgctggcattgctgcttacgtccaccccagaggctctgggtgccaaccccggcttggtcgccaggatcaccgacaagggactgcagtatgcggcccaggaggggctattggctctgcagagtgagctgctcaggatcacgctgcctgacttcaccggggacttgaggatcccccacgtcggccgtgggcgctatgagttccacagcctgaacatccacagctgtgagctgcttcactctgcgctgaggcctgtccccggccagggcctgagtctcagcatctccgactcctccatccgggtccagggcaggtggaaggtgcgcaagtcattcttcaaactacagggctcctttgatgtcagtgtcaagggcatcagcatttcggtcaacctcctgttgggcagcgagtcctccgggaggcccacaggttactgcctcagctgcagcagtgacatcgctgacgtggaggtggacatgtcgggagattcggggtggctcttgaacctcttccacaaccagattgagtccaagttccagaaagtactggagagcaggatttgcgaaatgatccagaaatcagtgtcctccgatctacagccttatctccaaactctgccagttacaacagagattgacagtttcgccgacattgattatagcttagtggaagcccctcgggcaacagcccagatgctggaggtgatgtttaagggtgaaatctttcatcgtaaccaccgttctccagttaccctccttgctgcagctgaggaacacaacaaaatggtctactttgccatctcggattatgtcttcaacacggccagcctggtttatcatgaggaaggatatctgaacttctccatcacagatgacatgataccgcctgactctaatatccgactgaccaccaagtccttccgacccttcgtcccacggttagccaggctctaccccaacatgaacctggaactccagggatcagtgccctctgctccgctcctgaacttcagccctgggaatctgtctgtggacccctatatggagatagatgcctttgtgctcctgcccagctccagcaaggagcctgtcttccggctcagtgtggccactaatgtgtccgccaccttgaccttcaataccagcaagatcactgggttcctgaagccaggaaaggtaaaagtggaactgaaagaatccaaagttggactattcaatgcagagctgttggaagcgctcctcaactattacatccttaacaccctctaccccaagttcaatgataagttggccgaaggcttcccccttcctctgctgaagcgtgttcagctctacgaccttgggctgcagatccataaggacttcctgttcttgggtgccaatgtccaatacatgagagtt

SEQ ID NO: 1149 - DNA, 1339 bp; single-stranded, linear
  immediate source library: GENBANK
  immediate source clone: g186967
gaattccgattagtgtgatctcagctcaaggcaaaggtgggatatcatggcatctatctgggttggacaccgaggaacagtaagagattatccagactttagcccatcagtggatgctgaagctattcagaaagcaatcagaggaattggaactgatgagaaaatgctcatcagcattctgactgagaggtcaaatgcacagcggcagctgattgttaaggaatatcaagcagcatatggaaaggagctgaaagatgacttgaagggtgatctctctggccactttgagcatctcatggtggccctagtgactccaccagcagtctttgatgcaaagcagctaaagaaatccatgaagggcgcgggaacaaacgaagatgccttgattgaaatcttaactaccaggacaagcaggcaaatgaaggatatctctcaagcctattatacagtatacaagaagagtcttggagatgacattagttccgaaacatctggtgacttccggaaagctctgttgactttggcagatggcagaagagatgaaagtctgaaagtggatgagcatctggccaaacaagatgcccagattctctataaagctggtgagaacagatggggcacggatgaagacaaattcactgagatcctgtgtttaaggagctttcctcaattaaaactaacatttgatgaatacagaaatatcagccaaaaggacattgtggacagcataaaaggagaattatctgggcattttgaagacttactgttggccatagttaattgtgtgaggaacacgccggcctttttagccgaaagactgcatcgagccttgaagggtattggaactgatgagtttactctgaaccgaataatggtgtccagatcagaaattgaccttttggacattcgaacagagttcaagaagcattatggctattccctatattcagcaattaaatcggatacttctggagactatgaaatcacactcttaaaaatctgtggtggagatgactgaaccaagaagataatctccaaaggtccacgatgggctttcccaacagctccaccttacttcttctcatactatttaagagaacaagcaaatataaacagcaacttgtgttcctaacaggaattttcattgttctataacaacaacaacaaaagcgattattattttagagcatctcatttataatgtagcagctcataaatgaaattgaaaatggtattaaagatctgcaactactatccaacttatatttctgctttcaaagttaagaatctttatagttctactccattaaatataaagcaagataataaaacggaattc

SEQ ID NO: 1150 - DNA, 920 bp; single-stranded, linear
  immediate source library: GENBANK
  immediate source clone: g187116
gcacggaggggcagagaccccggagccccagccccaccatgaccctcggccgccgactcgcgtgtcttttcctcgcctgtgtcctgccggccttgctgctggggggcaccgcgctggcctcggagattgtggggggccggcgagcgcggccccacgcgtggcccttcatggtgtccctgcagctgcgcggaggccacttctgcggcgccaccctgattgcgcccaacttcgtcatgtcggccgcgcactgcgtggcgaatgtaaacgtccgcgcggtgcgggtggtcctgggagcccataacctctcgcggcgggagcccacccggcaggtgttcgccgtgcagcgcatcttcgaaaacggctacgaccccgtaaacttgctcaacgacatcgtgattctccagctcaacgggtcggccaccatcaacgccaacgtgcaggtggcccagctgccggctcagggacgccgcctgggcaacggggtgcagtgcctggccatgggctggggccttctgggcaggaaccgtgggatcgccagcgtcctgcaggagctcaacgtgacggtggtgacgtccctctgccgtcgcagcaacgtctgcactctcgtgaggggccggcaggccggcgtctgtttcggggactccggcagccccttggtctgcaacgggctaatccacggaattgcctccttcgtccggggaggctgcgcctcagggctctaccccgatgcctttgccccggtggcacagtttgtaaactggatcgactctatcatccaacgctccgaggacaacccctgtccccacccccgggacccggacccggccagcaggacccactgagaagggctgcccgggtcacctcagctgcccacacccacactctccagcatctggcacaataaacattctctgttttgt

SEQ ID NO: 1151 - DNA, 2288 bp; single-stranded, linear
  immediate source library: GENBANK
  immediate source clone: g187118
ggagcctcgggaggtggtggagtgacctggccccagtgctgcgtccttatcagccgagccggtcccagctcttgctcctgcctgtttgcctggaaatggccacgcttctccttctccttggggtgctggtggtaagcccagacgctctggggagcacaacagcagtgcagacacccacctccggagagcctttggtctctactagcgagcccctgagctcaaagatgtacaccacttcaataacaagtgaccctaaggccgacagcactggggaccagacctcagccctacctccctcaacttccatcaatgagggatcccctctttggacttccattggtgccagcactggttcccctttacctgagccaacaacctaccaggaagtttccatcaagatgtcatcagtgccccaggaaacccctcatgcaaccagtcatcctgctgttcccataacagcaaactctctaggatcccacaccgtgacaggtggaaccataacaacgaactctccagaaacctccagtaggaccagtggagcccctgttaccacggcagctagctctctggagacctccagaggcacctctggaccccctcttaccatggcaactgtctctctggagacttccaaaggcacctctggaccccctgttaccatggcaactgactctctggagacctccactgggaccactggaccccctgttaccatgacaactggctctctggagccctccagcggggccagtggaccccaggtctctagcgtaaaactatctacaatgatgtctccaacgacctccaccaacgcaagcactgtgcccttccggaacccagatgagaactcacgaggcatgctgccagtggctgtgcttgtggccctgctggcggtcatagtcctcgtggctctgctcctgctgtggcgccggcggcagaagcggcggactggggccctcgtgctgagcagaggcggcaagcgtaacggggtggtggacgcctgggctgggccagcccaggtccctgaggagggggccgtgacagtgaccgtgggagggtccgggggcgacaagggctctgggttccccgatggggaggggtctagccgtcggcccacgctcaccactttctttggcagacggaagtctcgccagggctccctggcgatggaggagctgaagtctgggtcaggccccagcctcaaaggggaggaggagccactggtggccagtgaggatggggctgtggacgccccagctcctgatgagcccgaagggggagacggggctgccccttaagtgtcggtgaatagtgaggctggaggccggaatctcagccagcctccagcaccttccctctcaccatcccactgccccctcgctcccatgtttccacccggcaccctgatcctcacccgaatctcctttttttttttcttttgagacagagtttcgctttgtcgcccaggctggagtgcaatgcacgatctcagttcactgcaacctctgcctcctaagttcaggcgattctcctgcctcagcttcccgagtaactgagattacaggcacccaccaccatgcccagctgcttttttgtatttttggtagagatggggtttcaccatgttggctaggctggtctcaaactcctgacctcaggtgatctacctgcctcagcctcccaaagtgctgagattacagacatgagcctccgcgccttgcctcctcacccacctcttcactctgaatcctcatgaggcttctcagccctggatttcctgctgccatcctcacccagcacccacaactagcgcctgggcagggcagggctggcacctctcaacgtctgtggactgaatgaataaaccctcctcttacaaatgccaaaattcattcagctttgatgataaacactgaggcccaatggcctttatcatctagggagtatgaagaatgagcaagaggctaactcagcgtgagttaccctgggaaaggaaagaagaaatggttcatataggacacacatagataccttcaagggtgtttgtagagttgtttcttaagtagttggtttccttcacagaaagttcttaaactcagaatatacccatccatgcaccccaccagcaatacaaagaccccaaacaaaaaattactatattcttaccctacgcatggcttcctcctcttcttgacgcttttcataatgtgcaaagtcatcaaagattgaggtggtatgcttgaaagtagcaattattttaagcacttgcttagctttttcaagggacg

SEQ ID NO: 1152 - DNA, 1362 bp; single-stranded, linear
  immediate source library: GENBANK
  immediate source clone: g187137
catttggggacgctctcagctctcggcgcacggcccagcttccttcaaaatgtctactgttcacgaaatcctgtgcaagctcagcttggagggtgatcactctacacccccaagtgcatatgggtctgtcaaagcctatactaactttgatgctgagcgggatgctttgaacattgaaacagccatcaagaccaaaggtgtggatgaggtcaccattgtcaacattttgaccaaccgcagcaatgcacagagacaggatattgccttcgcctaccagagaaggaccaaaaaggaacttgcatcagcactgaagtcagccttatctggccacctggagacggtgattttgggcctattgaagacacctgctcagtatgacgcttctgagctaaaagcttccatgaaggggctgggaaccgacgaggactctctcattgagatcatctgctccagaaccaaccaggagctgcaggaaattaacagagtctacaaggaaatgtacaagactgatctggagaaggacattatttcggacacatctggtgacttccgcaagctgatggttgccctggcaaagggtagaagagcagaggatggctctgtcattgattatgaactgattgaccaagatgctcgggatctctatgacgctggagtgaagaggaaaggaactgatgttcccaagtggatcagcatcatgaccgagcggagcgtgccccacctccagaaagtatttgataggtacaagagttacagcccttatgacatgttggaaagcatcaggaaagaggttaaaggagacctggaaaatgctttcctgaacctggttcagtgcattcagaacaagcccctgtattttgctgatcggctgtatgactccatgaagggcaaggggacgcgagataaggtcctgatcagaatcatggtctcccgcagtgaagtggacatgttgaaaattaggtctgaattcaagagaaagtacggcaagtccctgtactattatatccagcaagacactaagggcgactaccagaaagcgctgctgtacctgtgtggtggagatgactgaagcccgacacggcctgagcgtccagaaatggtgctcaccatgcttccagctaacaggtctagaaaaccagcttgcgaataacagtccccgtggccatccctgtgagggtgacgttagcattacccccaacctcattttagttgcctaagcattgcctggccttcctgtctagtctctcctgtaagccaaagaaatgaacattccaaggagttggaagtgaagtctatgatgtgaaacactttgcctcctgtgtactgtgtcataaacagatgaataaactgaatttgtacttt

SEQ ID NO: 1153 - DNA, 2060 bp; single-stranded, linear
  immediate source library: GENBANK
  immediate source clone: g187172
ctctatcgacgagtctggtagctgagcgttgggctgtaggtcgctgtgctgtgtgatcccccagagccatgcccgagatagtggatacctgttcgttggcctctccggcttccgtctgccggaccaagcacctgcacctgcgctgcagcgtcgactttactcgccggacgctgaccgggactgctgctctcacggtccagtctcaggaggacaatctgcgcagcctggttttggatacaaaggaccttacaatagaaaaagtagtgatcaatggacaagaagtcaaatatgctcttggagaaagacaaagttacaagggatcgccaatggaaatctctcttcctatcgctttgagcaaaaatcaagaaattgttatagaaatttcttttgagacctctccaaaatcttctgctctccagtggctcactcctgaacagacttctgggaaggaacacccatatctctttagtcagtgccaggccatccactgcagagcaatccttccttgtcaggacactccttctgtgaaattaacctatactgcagaggtgtctgtccctaaagaactggtggcacttatgagtgctattcgtgatggagaaacacctgacccagaagacccaagcaggaaaatatacaaattcatccaaaaagttccaataccctgctacctgattgctttagttgttggagctttagaaagcaggcaaattggcccaagaactttggtgtggtctgagaaagagcaggtggaaaagtctgcttatgagttttctgagactgaatctatgcttaaaatagcagaagatctgggaggaccgtatgtatggggacagtatgacctattggtcctgccaccatccttcccttatggtggcatggagaatccttgccttacttttgtaactcctactctactggcaggcgacaagtcactctccaatgtcattgcacatgaaatatctcatagctggacagggaatctagtgaccaacaaaacttgggatcacttttggttaaatgagggacatactgtgtacttggaacgccacatttgcggacgattgtttggtgaaaagttcagacattttaatgctctgggaggatggggagaactacagaattcggtaaagacatttggggagacacatcctttcaccaaacttgtggttgatctgacagatatagaccctgatgtagcttattcttcagttccctatgagaagggctttgctttacttttttaccttgaacaactgcttggaggaccagagattttcctaggattcttaaaagcttatgttgagaagttttcctataagagcataactactgatgactggaaggatttcctgtattcctattttaaagataaggttgatgttctcaatcaagttgattggaatgcctggctctactctcctggactgcctcccataaagcccaattatgatatgactctgacaaatgcttgtattgccttaagtcaaagatggattactgccaaagaagatgatttaaattcattcaatgccacagacctgaaggatctctcttctcatcaattgaatgagtttttagcacagacgctccagagggcacctcttccattggggcacataaagcgaatgcaagaggtgtacaacttcaatgccattaacaattctgaaatacgattcagatggctgcggctctgcattcaatccaagtgggaggacgcaattcctttggcgctaaagatggcaactgaacaaggaagaatgaagtttacccggcccttattcaaggatcttgctgcctttgacaaatcccatgatcaagctgtccgaacctaccaagagcacaaagcaagcatgcatcccgtgactgcaatgctggtggggaaagacttaaaagtggattaaagacctgcgtattgatgattttagagatttctcttttttaaatggaattcgtaaagaaatataaaacttcagctcacaattaaaactgtctttttagttttggctttttattgttttgttggtgattttactgaaataaagatgagctacttcttc

SEQ ID NO: 1154 - DNA, 2354 bp; single-stranded, linear
  immediate source library: GENBANK
  immediate source clone: g187182
gagtgcagtctacctgcagcacagcacactcctttgggcaaggacctgagacccttgtgctaagtcaagaggctcaatgggctgcagaagaactagagaaggaccaagcaaagccatgatatttccatggaaatgtcagagcacccagagggacttatggaacatcttcaagttgtgggggtggacaatgctctgttgtgatttcctggcacatcatggaaccgactgctggacttaccattattctgaaaaacccatgaactggcaaagggctagaagattctgccgagacaattacacagatttagttgccatacaaaacaaggcggaaattgagtatctggagaagactctgcctttcagtcgttcttactactggataggaatccggaagataggaggaatatggacgtgggtgggaaccaacaaatctcttactgaagaagcagagaactggggagatggtgagcccaacaacaagaagaacaaggaggactgcgtggagatctatatcaagagaaacaaagatgcaggcaaatggaacgatgacgcctgccacaaactaaaggcagccctctgttacacagcttcttgccagccctggtcatgcagtggccatggagaatgtgtagaaatcatcaataattacacctgcaactgtgatgtggggtactatgggccccagtgtcagcttgtgattcagtgtgagcctttggaggccccagagctgggtaccatggactgtactcaccctttgggaaacttcagcttcagctcacagtgtgccttcagctgctctgaaggaacaaacttaactgggattgaagaaaccacctgtggaccatttggaaactggtcatctccagaaccaacctgtcaagtgattcagtgtgagcctctatcagcaccagatttggggatcatgaactgtagccatcccctggccagcttcagctttacctctgcatgtaccttcatctgctcagaaggaactgagttaattgggaagaagaaaaccatttgtgaatcatctggaatctggtcaaatcctagtccaatatgtcaaaaattggacaaaagtttctcaatgattaaggagggtgattataaccccctcttcattccagtggcagtcatggttactgcattctctgggttggcatttatcatttggctggcaaggagattaaaaaaaggcaagaaatccaagagaagtatgaatgacccatattaaatcgcccttggtgaaagaaaattcttggaatactaaaaatcatgagatcctttaaatccttccatgaaacgttttgtgtggtggcacctcctacgtcaaacatgaagtgtgtttccttcagtgcatctgggaagatttctacccgaccaacagttccttcagcttccatttcgcccctcatttatccctcaacccccagcccacaggtgtttatacagctcagctttttgtcttttctgaggagaaacaaataagaccataaagggaaaggattcatgtggaatataaagatggctgactttgctctttcttgactcttgttttcagtttcaattcagtgctgtacttgatgacagacacttctaaatgaagtgcaaatttgatacatatgtgaatatggactcagttttcttgcagatcaaatttcacgtcgtcttctgtatactgtggaggtacactcctatagaaagttcaaaaagtctacgctctcctttctttctaactccagtgaagtaatggggtcctgctcaagttgaaagagtcctatttgcactgtagcctcgccgtctgtgaattggaccatcctatttaactggcttcagcctccccaccttcttcagccacctctctttttcagttggctgacttccacacctagcatctcatgagtgccaagcaaaaggagagaagagagaaatagcctgcgctgttttttagtttgggggttttgctgtttccttttatgagacccattcctatttcttatagtcaatgtttcttttatcacgatattattagtaagaaaacatcactgaaatgctagctgcaagtgacatctctttgatgtcatatggaagagttaaaacaggtggagaaattccttgattcacaatgaaatgctctcctttcccctgcccccagaacttttatccacttacctagattctacatattctttaaatttcatctcaggcctccctcaaccccaccacttcttttataactagtcctttactaatccaacccatgatgagctcctcttcctggcttcttactgaaaggttaccctgtaacatgcaattttgcatttgaataaagcctgctttttaagtgggaattc

SEQ ID NO: 1155 - DNA, 2497 bp; single-stranded, linear
  immediate source library: GENBANK
  immediate source clone: g187192
gggcgccgaggctccccgccgctcgctgctccccggcccgcgccatgccctcctacacggtcaccgtggccactggcagccagtggttcgccggcactgacgactacatctacctcagcctcgtgggctcggcgggctgcagcgagaagcacctgctggacaagcccttctacaacgacttcgagcgtggcgcggtggattcatacgacgtgactgtggacgaggaactgggcgagatccagctggtcagaatcgagaagcgcaagtactggctgaatgacgactggtacctgaagtacatcacgctgaagacgccccacggggactacatcgagttcccctgctaccgctggatcaccggcgatgtcgaggttgtcctgagggatggacgcgcaaagttggcccgagatgaccaaattcacattctcaagcaacaccgacgtaaagaactggaaacacggcaaaaacaatatcgatggatggagtggaaccctggcttccccttgagcatcgatgccaaatgccacaaggatttaccccgtgatatccagtttgatagtgaaaaaggagtggactttgttctgaattactccaaagcgatggagaacctgttcatcaaccgcttcatgcacatgttccagtcttcttggaatgacttcgccgactttgagaaaatctttgtcaagatcagcaacactatttctgagcgggtcatgaatcactggcaggaagacctgatgtttggctaccagttcctgaatggctgcaaccctgtgttgatccggcgctgcacagagctgcccgagaagctcccggtgaccacggagatggtagagtgcagcctggagcggcagctcagcttggagcaggaggtccagcaagggaacattttcatcgtggactttgagctgctggatggcatcgatgccaacaaaacagacccctgcacactccagttcctggccgctcccatctgcttgctgtataagaacctggccaacaagattgtccccattgccatccagctcaaccaaatcccgggagatgagaaccctattttcctcccttcggatgcaaaatacgactggcttttggccaaaatctgggtgcgttccagtgacttccacgtccaccagaccatcacccaccttctgcgaacacatctggtgtctgaggtttttggcattgcaatgtaccgccagctgcctgctgtgcaccccattttcaagctgctggtggcacacgtgagattcaccattgcaatcaacaccaaggcccgtgagcagctcatctgcgagtgtggcctctttgacaaggccaacgccacagggggcggtgggcacgtgcagatggtgcagagggccatgaaggacctgacctatgcctccctgtgctttcccgaggccatcaaggcccggggcatggagagcaaagaagacatcccctactacttctaccgggacgacgggctcctggtgtgggaagccatcaggacgttcacggccgaggtggtagacatctactacgagggcgaccaggtggtggaggaggacccggagctgcaggacttcgtgaacgatgtctacgtgtacggcatgcggggccgcaagtcctcaggcttccccaagtcggtcaagagccgggagcagctgtcggagtacctgaccgtggtgatcttcaccgcctccgcccagcacgccgcggtcaacttcggccagtacgactggtgctcctggatccccaatgcgcccccaaccatgcgagccccgccaccgactgccaagggcgtggtgaccattgagcagatcgtggacacgctgcccgaccgcggccgctcctgctggcatctgggtgcagtgtgggcgctgagccagttccaggaaaacgagctgttcctgggcatgtacccagaagagcattttatcgagaagcctgtgaaggaagccatggcccgattccgcaagaacctcgaggccattgtcagcgtgattgctgagcgcaacaagaagaagcagctgccatattactacttgtccccagaccggattccgaacagtgtggccatctgagcacactgccagtctcactgtgggaaggccagctgccccagccagatggactccagcctgcctggcaggctgtctggccaggcctcttggcagtcacatctcttcctccgaggccagtacctttccatttattctttgatcttcagggaactgcatagattgtatcaaagtgtaaacaccatagggacccattctacacagagcaggactgcacaggcgtcctgtccacacccagctcagcatttccacaccaagcagcaacagcaaatcacgaccactgatagatgtctattcttgttggagacatgggatgattattttctgttctatttgtgcttagtccaattccttgcacatagtaggtacccaattcaattactattgaatgaattaagaattggttgccataaaaataaatcagttcattt

SEQ ID NO: 1156 - DNA, 2426 bp; single-stranded, linear
  immediate source library: GENBANK
  immediate source clone: g187239
gaccagagcaatttctgcttttcacagggcgggtttctcaacggtgacttgtgggcagtgccttctgctgagcgagtcatggcccgaaggcagaactaactgtgcctgcagtcttcactctcaggatgcagccgaggtgggcccaaggggccacgatgtggcttggagtcctgctgacccttctgctctgttcaagccttgagggtcaagaaaactctttcacaatcaacagtgttgacatgaagagcctgccggactggacggtgcaaaatgggaagaacctgaccctgcagtgcttcgcggatgtcagcaccacctctcacgtcaagcctcagcaccagatgctgttctataaggatgacgtgctgttttacaacatctcctccatgaagagcacagagagttattttattcctgaagtccggatctatgactcagggacatataaatgtactgtgattgtgaacaacaaagagaaaaccactgcagagtaccaggtgttggtggaaggagtgcccagtcccagggtgacactggacaagaaagaggccatccaaggtgggatcgtgagggtcaactgttctgtcccagaggaaaaggccccaatacacttcacaattgaaaaacttgaactaaatgaaaaaatggtcaagctgaaaagagagaagaattctcgagaccagaattttgtgatactggaattccccgttgaggaacaggaccgcgttttatccttccgatgtcaagctaggatcatttctgggatccatatgcagacctcagaatctaccaagagtgaactggtcaccgtgacggaatccttctctacacccaagttccacatcagccccaccggaatgatcatggaaggagctcagctccacattaagtgcaccattcaagtgactcacctggcccaggagtttccagaaatcataattcagaaggacaaggcgattgtggcccacaacagacatggcaacaaggctgtgtactcagtcatggccatggtggagcacagtggcaactacacgtgcaaagtggagtccagccgcatatccaaggtcagcagcatcgtggtcaacataacagaactattttccaagcccgaactggaatcttccttcacacatctggaccaaggtgaaagactgaacctgtcctgctccatcccaggagcacctccagccaacttcaccatccagaaggaagatacgattgtgtcacagactcaagatttcaccaagatagcctcaaagtcggacagtgggacgtatatctgcactgcaggtattgacaaagtggtcaagaaaagcaacacagtccagatagtcgtatgtgaaatgctctcccagcccaggatttcttatgatgcccagtttgaggtcataaaaggacagaccatcgaagtccgttgcgaatcgatcagtggaactttgcctatttcttaccaacttttaaaaacaagtaaagttttggagaatagtaccaagaactcaaatgatcctgcggtattcaaagacaaccccactgaagacgtcgaataccagtgtgttgcagataattgccattcccacgccaaaatgttaagtgaggttctgagggtgaaggtgatagccccggtggatgaggtccagatttctatcctgtcaagtaaggtggtggagtctggagaggacattgtgctgcaatgtgctgtgaatgaaggatctggtcccatcacctataagttttacagagaaaaagagggcaaacccttctatcaaatgacctcaaatgccacccaggcattttggaccaagcagaaggctaacaaggaacaggagggagagtattactgcacagccttcaacagagccaaccacgcctccagtgtccccagaagcaaaatactgacagtcagagtcattcttgccccatggaagaaaggacttattgcagtggttatcatcggagtgatcattgctctcttgatcattgcggccaaatgttattttctgaggaaagccaaggccaagcagatgccagtggaaatgtccaggccagcagtaccacttctgaactccaacaacgagaaaatgtcagatcccaatatggaagctaacagtcattacggtcacaatgacgatgtcggaaaccatgcaatgaaaccaataaatgataataaagagcctctgaactcagacgtgcagtacacggaagttcaagtgtcctcagctgagtctcacaaagatctaggaaagaaggacacagagacagtgtacagtgaagtccggaaagctgtccctgatgccgtggaaagcagatactctagaacggaaggctcccttgatggaacttagacagcaaggccagatgcacatccctggaaggacatccatgttccgagaagaacagatgatccctgtatttcaagacctctgtcc

SEQ ID NO: 1157 - DNA, 1531 bp; single-stranded, linear
  immediate source library: GENBANK
  immediate source clone: g187262
agtcacagagggaacacagagcctagttgtaaacggacagagacgagaggggcaagggaggacagtggatgacagggaagacgagtgggggcagagctgctcaggaccatggctgaggccatcacctatgcagatctgaggtttgtgaaggctcccctgaagaagagcatctccagccggttaggacaggacccaggggctgatgatgatggggaaatcacctacgagaatgttcaagtgcccgcagtcctaggggtgccctcaagcttggcttcttctgtactaggggacaaagcagcggtcaagtcggagcagccaactgcgtcctggagagccgtgacgtcaccagctgtcgggcggattctcccctgccgcacaacctgcctgcgatacctcctgctcggcctgctcctcacctgcctgctgttaggagtgaccgccatctgcctgggagtgcgctatctgcaggtgtctcagcagctccagcagacgaacagggttctggaagtcactaacagcagcctgaggcagcagctccgcctcaagataacgcagctgggacagagtgcagaggatctgcaggggtccaggagagagctggcgcagagtcaggaagcactacaggtggaacagagggctcatcaggcggccgaagggcagctacaggcctgccaggcagacagacagaagacgaaggagaccttgcaaagtgaggagcaacagaggagggccttggagcagaagctgagcaacatggagaacagactgaagcccttcttcacatgcggctcagcagacacctgctgtccgtcgggatggataatgcatcagaaaagctgcttttacatctcacttacttcaaaaaattggcaggagagccaaaaacaatgtgaaactctgtcttccaagctggccacattcagtgaaatttatccacaatcacactcttactacttcttaaattcactgttgccaaatggtggttcagggaattcatattggactggcctcagctctaacaaggattggaagttgactgatgatacacaacgcactaggacttatgctcaaagctcaaaatgtaacaaggtacataaaacttggtcatggtggacactggagtcagagtcatgtagaagttctcttccctacatctgtgagatgacagctttcaggtttccagattaggacagtcctttgcactgagttgacactcatgccaacaagaacctgtgcccctccttcctaacctgaggcctggggttcctcagaccatctccttcattctgggcagtgccagccaccggctgacccacacctgacacttccagccagtctgctgcctgctccctcttcctgaaactggactgttcctgggaaaagggtgaagccacctctagaagggactttggcctccccccaagaacttcccatggtagaatggggtgggggaggagggcgcacgggctgagcggataggggcggcccggagccagccaggcagttttattgaaatctttttaaataattg

SEQ ID NO: 1158 - DNA, 2298 bp; single-stranded, linear
  immediate source library: GENBANK
  immediate source clone: g187268
tcggccgagcccagagacagccagttcctctcccgccgcgccgggccgcgtgccgctcgctccccggccgtggcgcctccgggccagacgcgctgcagcctccagcccgcggcaagcgggcggggcggccgcgccacccccggccccgcgccagcagcccctcgccgcgcgtccagcgttcccggccagcagcctccccatacgcagtcctgctggaccgccccgtcgcgccccccactctgaactcaagtcaccgtggagctccgccgccccgaaactttcacgcgagcgggaaatatgggatgtataaaatcaaaagggaaagacagcttgagtgacgatggagtagatttgaagactcaaccagtacgtaatactgaaagaactatttatgtgagagatccaacgtccaataaacagcaaaggccagttccagaatctcagcttttacctggacagaggtttcaaactaaagatccagaggaacaaggagacattgtggtagccttgtacccctatgatggcatccacccggacgacttgtctttcaagaaaggagagaagatgaaagtcctggaggagcatggagaatggtggaaagcaaagtcccttttaacaaaaaaagaaggcttcatccccagcaactatgtggccaaactcaacaccttagaaacagaagagtggtttttcaaggatataaccaggaaggacgcagaaaggcagcttttggcaccaggaaatagcgctggagctttccttattagagaaagtgaaacattaaaaggaagcttctctctgtctgtcagagactttgaccctgtgcatggtgatgttattaagcactacaaaattagaagtctggataatgggggctattacatctctccacgaatcacttttccctgtatcagcgacatgattaaacattaccaaaagcaggcagatggcttgtgcagaagattggagaaggcttgtattagtcccaagccacagaagccatgggataaagatgcctgggagatcccccgggagtccatcaagttggtgaaaaggcttggcgctgggcagtttggggaagtctggatgggttactataacaacagtaccaaggtggctgtgaaaaccctgaagccaggaactatgtctgtgcaagccttcctggaagaagccaacctcatgaagaccctgcagcatgacaagctcgtgaggctctacgctgtggtcaccagggaggagcccatttacatcatcaccgagtacatggccaagggcagtttgctggatttcctgaagagcgatgaaggtggcaaagtgctgcttccaaagctcattgacttttctgctcagattgcagagggaatggcatacatcgagcggaagaactacattcaccgggacctgcgagcagctaatgttctggtctccgagtcactaatgtgcaaaattgcagattttggccttgctagagtaattgaagataatgagtacacagcaagggaaggtgctaagttccctattaagtggacggctccagaagcaatcaactttggatgtttcactattaagtctgatgtgtggtcctttggaatcctcctatacgaaattgtcacctatgggaaaattccctacccagggagaactaatgccgacgtgatgaccgccctgtcccagggctacaggatgccccgtgtggagaactgcccagatgagctctatgacattatgaaaatgtgctggaaagaaaaggcagaagagagaccaacgtttgactacttacagagcgtcctggatgatttctacacagccacggaagggcaataccagcagcagccttagagcacagggagacccgtccatttggcaggggtggctgcctcatttagagaggaaaagtaaccatcactggttgcacttatgatttcatgtgcggggatcatctgccgtgcctggatcctgaaatagaggctaaattactcaggaagaacaccctctaaatgggaaagtattctgtactcttagatggattctccactcagttgcaacttggacttgtcctcagcagctggtaatcttgctctgcttgacaacatctgagtgcagccgtttgagaagaaaacatctattctctccaaaaatgcacccaactagctctatgtttacaaatggacataggactcaaagtttcagagaccattgcaatgaatccccaataattgcagaactaaactcatttataaagctaaaataaccggatatatacatagcatgacatttctttgtgctttggcttacttgttt

SEQ ID NO: 1159 - DNA, 598 bp; single-stranded, linear
  immediate source library: GENBANK
  immediate source clone: g187273
caattcagaagagccacccagaaggagacaacaatgtccctgctacccgtgccatacacagaggctgcctctttgtctactggttctactgtgacaatcaaagggcgaccacttgtctgtttcttgaatgaaccatatctgcaggtggatttccacactgagatgaaggaggaatcagacattgtcttccatttccaagtgtgctttggtcgtcgtgtggtcatgaacagccgtgagtatggggcctggaagcagcaggtggaatccaagaacatgccctttcaggatggccaagaatttgaactgagcatctcagtgctgccagataagtaccaggtaatggtcaatggccaatcctcttacacctttgaccatagaatcaagcctgaggctgtgaagatggtgcaagtgtggagagatatctccctgaccaaatttaatgtcagctatttaaagagataaccagacttcatgttgccaaggaatccctgtctctacgtgaacttgggattccaaagccagctaacagcatgatcttttctcacttcaatccttactcctgctcattaaaacttaatcaaacttcaaaaaaaaaaaa

SEQ ID NO: 1160 - DNA, 1002 bp; single-stranded, linear
  immediate source library: GENBANK
  immediate source clone: g187288
cgccagagaggctccctcagccctgctccgcggggtccacagcgggctccacagcgggctccatagcgggctccacagcggtccggcggcggcagcgagcccgtgggcagtgggggttggtcccgtggctccggcccccggtgcagaatggcggcggcggttcggatgaacatccagatgctgctggaggcggccgactatctggagcggcgggagagagaagctgaacatggttatgcctccatgttaccatacaataacaaggacagagatgccttaaaacggaggaacaaatccaaaaagaataacagcagtagcagatcaactcacaatgaaatggagaagaatagacgggctcatcttcgcttgtgcctggagaagttgaaggggctggtgccactgggacccgaatcaagtcgacacactacgttgagtttattaacaaaagccaaattgcacataaagaaacttgaagattgtgacagaaaagccgttcaccaaatcgaccagcttcagcgagagcagcgacacctgaagaggcagctggagaagctgggcattgagaggatccggatggacagcatcggctccaccgtctcctcggagcgctccgactccgacagggaagaaatcgacgttgacgtggagagcacggactatctcacaggtgatctggactggagcagcagcagtgtgagcgactctgacgagcggggcagcatgcagagcctcggcagtgatgagggctattccagcaccagcatcaagagaataaagctgcaggacagtcacaaggcgtgtcttggtctctaagagagtgggcactgcggctgtctccttgaaggttctccctgttggttctgattaggtaacgtattggacctgcccacaactcccttgcacgtaaacttcagtgtcccaccttgaccaaaatcagctttgtaactgttttcaaggaggtgcttaggattgtgggtttctgattgcatcactagcttctcc

SEQ ID NO: 1161 - DNA, 1550 bp; single-stranded, linear
  immediate source library: GENBANK
  immediate source clone: g187290
tgccgccgtcccgcccgccagcgccccagcgaggaagcagcgcgcagcccgcggcccagcgcacccgcagcagcgcccgcagctcgtccgcgccatgttccaggcggccgagcgcccccaggagtgggccatggagggcccccgcgacgggctgaagaaggagcggctactggacgaccgccacgacagcggcctggactccatgaaagacgaggagtacgagcagatggtcaaggagctgcaggagatccgcctcgagccgcaggaggtgccgcgcggctcggagccctggaagcagcagctcaccgaggacggggactcgttcctgcacttggccatcatccatgaagaaaaggcactgaccatggaagtgatccgccaggtgaagggagacctggctttcctcaacttccagaacaacctgcagcagactccactccacttggctgtgatcaccaaccagccagaaattgctgaggcacttctgggagctggctgtgatcctgagctccgagactttcgaggaaatacccccctacaccttgcctgtgagcagggctgcctggccagcgtgggagtcctgactcagtcctgcaccaccccgcacctccactccatcctgaaggctaccaactacaatggccacacgtgtctacacttagcctctatccatggctacctgggcatcgtggagcttttggtgtccttgggtgctgatgtcaatgctcaggagccctgtaatggccggactgcccttcacctcgcagtggacctgcaaaatcctgacctggtgtcactcctgttgaagtgtggggctgatgtcaacagagttacctaccagggctattctccctaccagctcacctggggccgcccaagcacccggatacagcagcagctgggccagctgacactagaaaaccttcagatgctgccagagagtgaggatgaggagagctatgacacagagtcagagttcacggagttcacagaggacgagctgccctatgatgactgtgtgtttggaggccagcgtctgacgttatgagtgcaaaggggctgaaagaacatggacttgtatatttgtacaaaaaaaaagttttatttttctaaaaaaagaaaaaagaagaaaaaatttaaagggtgtacttatatccacactgcacactgcctagcccaaaacgtcttattgtggtaggatcagccctcattttgttgcttttgtgaactttttgtaggggacgagaaagatcattgaaattctgagaaaacttcttttaaacctcacctttgtggggtttttggagaaggttatcaaaaatttcatggaaggaccacattttatatttattgtgcttcgagtgactgaccccagtggtatcctgtgacatgtaacagccaggagtgttaagcgttcagtgatgtggggtgaaaagttactacctgtcaaggtttgtgttaccctcctgtaaatggtgtacataatgtattgttggtaattattttggtacttttatgatgtatatttattaaagagatttttacaaatg

SEQ ID NO: 1162 - DNA, 1885 bp; single-stranded, linear
  immediate source library: GENBANK
  immediate source clone: g187386
tttattacttctttttttttcgaactacacttgggctcctttttttgtgctcgacttttccaccctttttccctccctcctgtgctgctgctttttgatctcttcgactaaaatttttttatccggagtgtatttaatcggttctgttctgtcctctccaccacccccacccccctccctccggtgtgtgtgccgctgccgctgttgccgccgccgctgctgctgctgctcgccccgtcgttacaccaacccgaggctctttgtttcccctcttggatctgttgagtttctttgttgaagaagccagcatgggtgcccagttctccaagaccgcagcgaagggagaagccgccgcggagaggcctggggaggcggctgtggcctcgtcgccttccaaagcgaacggacaggagaatggccacgtgaaggtaaacggcgacgcttcgcccgcggccgccgagtcgggcgccaaggaggagctgcaggccaacggcagcgccccggccgccgacaaggaggagcccgcggccgccgggagcggggcggcgtcgccctccgcggccgagaaaggtgagccggccgccgccgctgcccccgaggccggggccagcccggtagagaaggaggcccccgcggaaggcgaggctgccgagcccggctcgcccacggccgcggagggagaggccgcgtcggccgcctcctcgacttcttcgcccaaggccgaggacggggccacgccctcgcccagcaacgagaccccgaaaaaaaaaaagaagcgcttttccttcaagaagtctttcaagctgagcggcttctccttcaagaagaacaagaaggaggctggagaaggcggtgaggctgaggcgcccgctgccgaaggcggcaaggacgaggccgccgggggcgcagctgcggccgccgccgaggcgggcgcggcctccggggagcaggcagcggcgccgggcgaggaggcagcagcgggcgaggagggggcggcgggtggcgactcgcaggaggccaagccccaggaggccgctgtcgcgccagagaagccgcccgccagcgacgagaccaaggccgccgaggagcccagcaaggtggaggagaaaaaggccgaggaggccggggccagcgccgccgcctgcgaggccccctccgccgccgggctggtgtgcccccggagaggaggcagcccccgcggaggagcccgcggccgccgcagcctcaatcaagcctgcgcagccccctcacaggaggcccagcccgagtgcagtccagaagcccccccagcggaggcggcagagtaaaagagcaagcttttgtgagataatcgaagaacattttctcccccgtttgtttggttggagtggtgccaggtactggattttggagaacttgtctacaaccagggattgattttaaagatgtctttttttattttacttttttttaagcaccaaattttgttgttttttttttctcccctccccacagatcccatctcaaatcattctgttaaccaccattccaacaggtcgaggagagcttaaacaccttcttcctctggccttgtttctcttttattttttattttttcgcatcagtattaatgtttttgcatactttgcatctttattcaaaagtgtaaactttctttgtcaatctatggacatgcccatatatgaaggagatgggtgggtcaaaaagggatatcaaatgaagtgataggggtcacaatggggaaattgaagtggtgcataacattgccaaaatagtgtgccactagaaatggtgtaaaggctgtctttttttttttttttaaagaaaagttattaccatgtattttgtgaggcaggtttacaacactacaactcgtgccgaattc

SEQ ID NO: 1163 - DNA, 537 bp; single-stranded, linear
  immediate source library: GENBANK
  immediate source clone: g187390
cagtggccgctccctgggccgtaggaaatgagcgataacgatgacatcgaggtggagagcgacgaagagcaaccgaggtttcaatctgcggctgacaaacgggctcatcataatgcactggaacgaaaacgtagggaccacatcaaagacagctttcacagtttgcgggactcagtcccatcactccaaggagagaaggcatcccgggcccaaatcctagacaaagccacagagtatatccagtatatgcgaaggaaaaaccacacacaccagcaagatattgacgacctcaagcggcagaatgctcttctggagcagcaagtccgtgcactggagaaggcgaggtcaagtgcccaactgcagaccaactacccctcctcagacaacagcctctacaccaacgccaagggcagcaccatctctgccttcgatgggggctcagactccagctcagagtctgagcctgaagagccccaaagcaggaagaagctccggatggaggccagctaagccactcggggcaggccagcaataaaa

SEQ ID NO: 1164 - DNA, 848 bp; single-stranded, linear
  immediate source library: GENBANK
  immediate source clone: g187414
aaaagaaggacctgggctttgggaagatctaaagacccaggaaggtctctgggtgggataaagccaagatgaaactccccctacttctggctcttctatttggggcagtttctgctcttcatctaaggtctgagacttccacctttgagacccctttgggtgctaagacgctgcctgaggatgaggagacaccagagcaggagatggaggagaccccttgcagggagctggaggaagaggaggagtggggctctggaagtgaagatgcctccaagaaagatggggctgttgagtctatctcagtgccagatatggtgcacaaaaaccttacgtgtcctgaggaagaggacacagtaaaagtggtgggcatccctgggtgccagacctgccgctacctcctggtgagaagtcttcagacgtttagtcaagcttggtttacttgccggaggtgctacaggggcaacctggtttccatccacaacttcaatattaattatcgaatccagtgttctgtcagcgcgctcaaccagggtcaagtctggattggaggcaggatcacaggctcgggtcgctgcagacgctttcagtgggttgacggcagccgctggaactttgcgtactgggctgctcaccagccctggtcccgcggtggtcactgcgtggccctgtgtacccgaggaggctactggcgtcgagcccactgcctcagaagacttcctttcatctgttcctactgagctggtcccagccagcagttcagagctgccctctcctgggcagctgcctcccctcctctgcttgccatccctccctccacctccctgcaataaaatgggttttactgaaaa

SEQ ID NO: 1165 - DNA, 741 bp; single-stranded, linear
  immediate source library: GENBANK
  immediate source clone: g187434
aaccgagaggctgagactaacccagaaagatccaattctcaaactgaagctcgcactctcgcctccagcatgaaagtctctgccgcccttctgtgcctgctgctcatagcagccaccttcattccccaagggctcgctcagccagatgcaatcaatgccccagtcacctgctgttataacttcaccaataggaagatctcagtgcagaggctcgcgagctatagaagaatcaccagcagcaagtgtcccaaagaagctgtgatcttcaagaccattgtggccaaggagatctgtgctgaccccaagcagaagtgggttcaggattccatggaccacctggacaagcaaacccaaactccgaagacttgaacactcactccacaacccaagaatctgcagctaacttattttcccctagctttccccagacaccctgttttattttattataatgaattttgtttgttgatgtgaaacattatgccttaagtaatgttaattcttatttaagttattgatgttttaagtttatctttcatggtactagtgttttttagatacagagacttggggaaattgcttttcctcttgaaccacagttctacccctgggatgttttgagggtctttgcaagaatcattaatacaaagaattttttttaacattccaatgcattgctaaaatattattgtggaaatgaatattttgtaactattacaccaaataaatatatttttgtac

SEQ ID NO: 1166 - DNA, 1221 bp; single-stranded, linear
  immediate source library: GENBANK
  immediate source clone: g187455
cgcaggctggaaggaagacgaacctacgaagcagagatctgaagacagcatgtacacagccattccccagagtggctctccattcccaggctcagtgcaggatccaggcctgcatgtgtggcgggtggagaagctgaagccggtgcctgtggcgcaagagaaccagggcgtcttcttctcgggggactcctacctagtgctgcacaatggcccagaagaggtttcccatctgcacctgtggataggccagcagtcatcccgggatgagcagggggcctgtgccgtgctggctgtgcacctcaacacgctgctgggagagcggcctgtgcagcaccgcgaggtgcagggcaatgagtctgacctcttcatgagctacttcccacggggcctcaagtaccaggaaggtggtgtggagtcagcatttcacaagacctccacaggagccccagctgccatcaagaaactctaccaggtgaaggggaagaagaacatccgtgccaccgagcgggcactgaactgggacagcttcaacactggggactgcttcatcctggacctgggccagaacatcttcgcctggtgtggtggaaagtccaacatcctggaacgcaacaaggcgagggacctggccctggccatccgggacagtgagcgacagggcaaggcccaggtggagattgtcactgatggggaggagcctgctgagatgatccaggtcctgggccccaagcctgctctgaaggagggcaaccctgaggaagacctcacagctgacaaggcaaatgcccaggccgcagctctgtataaggtctctgatgccactggacagatgaacctgaccaaggtggctgactccagcccctttgcccttgaactgctgatatctgatgactgctttgtgctggacaacgggctctgtggcaagatctatatctggaaggggcgaaaagcgaatgagaaggagcggcaggcagccctgcaggtggccgagggcttcatctcgcgcatgcagtacgccccgaacactcaggtggagattctgcctcagggccgtgagagtcccatcttcaagcaatttttcaaggactggaaatgagggtgggcgtcttcctgccccatgctcccctgccccccaccacctgcctgcttgcttctctggctgcctggtcagtgcagaggtgccccctgcagatgttcaataaaggagacaagtgctttccc

SEQ ID NO: 1167 - DNA, 4646 bp; single-stranded, linear
  immediate source library: GENBANK
  immediate source clone: g187468
cctactctattcagatattctccagattcctaaagattagagatcatttctcattctcctaggagtactcacttcaggaagcaaccagataaaagagaggtgcaacggaagccagaacattcctcctggaaattcaacctgtttcgcagtttctcgaggaatcagcattcagtcaatccgggccgggagcagtcatctgtggtgaggctgattggctgggcaggaacagcgccggggcgtgggctgagcacagcgcttcgctctctttgccacaggaagcctgagctcattcgagtagcggctcttccaagctcaaagaagcagaggccgctgttcgtttcctttaggtctttccactaaagtcggagtatcttcttccaagatttcacgtcttggtggccgttccaaggagcgcgaggtcgggatggatcttgaaggggaccgcaatggaggagcaaagaagaagaacttttttaaactgaacaataaaagtgaaaaagataagaaggaaaagaaaccaactgtcagtgtattttcaatgtttcgctattcaaattggcttgacaagttgtatatggtggtgggaactttggctgccatcatccatggggctggacttcctctcatgatgctggtgtttggagaaatgacagatatctttgcaaatgcaggaaatttagaagatctgatgtcaaacatcactaatagaagtgatatcaatgatacagggttcttcatgaatctggaggaagacatgaccaggtatgcctattattacagtggaattggtgctggggtgctggttgctgcttacattcaggtttcattttggtgcctggcagctggaagacaaatacacaaaattagaaaacagttttttcatgctataatgcgacaggagataggctggtttgatgtgcacgatgttggggagcttaacacccgacttacagatgatgtctctaagattaatgaagttattggtgacaaaattggaatgttctttcagtcaatggcaacatttttcactgggtttatagtaggatttacacgtggttggaagctaacccttgtgattttggccatcagtcctgttcttggactgtcagctgctgtctgggcaaagatactatcttcatttactgataaagaactcttagcgtatgcaaaagctggagcagtagctgaagaggtcttggcagcaattagaactgtgattgcatttggaggacaaaagaaagaacttgaaaggtacaacaaaaatttagaagaagctaaaagaattgggataaagaaagctattacagccaatatttctataggtgctgctttcctgctgatctatgcatcttatgctctggccttctggtatgggaccaccttggtcctctcaggggaatattctattggacaagtactcactgtattcttttctgtattaattggggcttttagtgttggacaggcatctccaagcattgaagcatttgcaaatgcaagaggagcagcttatgaaatcttcaagataattgataataagccaagtattgacagctattcgaagagtgggcacaaaccagataatattaagggaaatttggaattcagaaatgttcacttcagttacccatctcgaaaagaagttaagatcttgaagggcctgaacctgaaggtgcagagtgggcagacggtggccctggttggaaacagtggctgtgggaagagcacaacagtccagctgatgcagaggctctatgaccccacagaggggatggtcagtgttgatggacaggatattaggaccataaatgtaaggtttctacgggaaatcattggtgtggtgagtcaggaacctgtattgtttgccaccacgatagctgaaaacattcgctatggccgtgaaaatgtcaccatggatgagattgagaaagctgtcaaggaagccaatgcctatgactttatcatgaaactgcctcataaatttgacaccctggttggagagagaggggcccagttgagtggtgggcagaagcagaggatcgccattgcacgtgccctggttcgcaaccccaagatcctcctgctggatgaggccacgtcagccttggacacagaaagcgaagcagtggttcaggtggctctggataaggccagaaaaggtcggaccaccattgtgatagctcatcgtttgtctacagttcgtaatgctgacgtcatcgctggtttcgatgatggagtcattgtggagaaaggaaatcatgatgaactcatgaaagagaaaggcatttacttcaaacttgtcacaatgcagacagcaggaaatgaagttgaattagaaaatgcagctgatgaatccaaaagtgaaattgatgccttggaaatgtcttcaaatgattcaagatccagtctaataagaaaaagatcaactcgtaggagtgtccgtggatcacaagcccaagacagaaagcttagtaccaaagaggctctggatgaaagtatacctccagtttccttttggaggattatgaagctaaatttaactgaatggccttattttgttgttggtgtattttgtgccattataaatggaggcctgcaaccagcatttgcaataatattttcaaagattataggggtttttacaagaattgatgatcctgaaacaaaacgacagaatagtaacttgttttcactattgtttctagcccttggaattatttcttttattacatttttccttcagggtttcacatttggcaaagctggagagatcctcaccaagcggctccgatacatggttttccgatccatgctcagacaggatgtgagttggtttgatgaccctaaaaacaccactggagcattgactaccaggctcgccaatgatgctgctcaagttaaaggggctataggttccaggcttgctgtaattacccagaatatagcaaatcttgggacaggaataattatatccttcatctatggttggcaactaacactgttactcttagcaattgtacccatcattgcaatagcaggagttgttgaaatgaaaatgttgtctggacaagcactgaaagataagaaagaactagaaggtgctgggaagatcgctactgaagcaatagaaaacttccgaaccgttgtttctttgactcaggagcagaagtttgaacatatgtatgctcagagtttgcaggtaccatacagaaactctttgaggaaagcacacatctttggaattacattttccttcacccaggcaatgatgtatttttcctatgctggatgtttccggtttggagcctacttggtggcacataaactcatgagctttgaggatgttctgttagtattttcagctgttgtctttggtgccatggccgtggggcaagtcagttcatttgctcctgactatgccaaagccaaaatatcagcagcccacatcatcatgatcattgaaaaaacccctttgattgacagctacagcacggaaggcctaatgccgaacacattggaaggaaatgtcacatttggtgaagttgtattcaactatcccacccgaccggacatcccagtgcttcagggactgagcctggaggtgaagaagggccagacgctggctctggtgggcagcagtggctgtgggaagagcacagtggtccagctcctggagcggttctacgaccccttggcagggaaagtgctgcttgatggcaaagaaataaagcgactgaatgttcagtggctccgagcacacctgggcatcgtgtcccaggagcccatcctgtttgactgcagcattgctgagaacattgcctatggagacaacagccgggtggtgtcacaggaagagatcgtgagggcagcaaaggaggccaacatacatgccttcatcgagtcactgcctaataaatatagcactaaagtaggagacaaaggaactcagctctctggtggccagaaacaacgcattgccatagctcgtgcccttgttagacagcctcatattttgcttttggatgaagccacgtcagctctggatacagaaagtgaaaaggttgtccaagaagccctggacaaagccagagaaggccgcacctgcattgtgattgctcaccgcctgtccaccatccagaatgcagacttaatagtggtgtttcagaatggcagagtcaaggagcatggcacgcatcagcagctgctggcacagaaaggcatctatttttcaatggtcagtgtccaggctggaacaaagcgccagtgaactctgactgtatgagatgttaaatactttttaatatttgtttagatatgacatttattcaaagttaaaagcaaacacttacagaattatgaagaggtatctgtttaacatttcctcagtcaagttcagagtcttcagagacttcgtaattaaaggaacagagtgagagacatcatcaagtggagagaaatcatagtttaaactgcattataaattttataacagaattaaagtagattttaaaagataaaatgtgtaattttgtttatattttcccatttggactgtaactgactgccttgctaaaagattatagaagtagcaaaaagtattgaaatgtttgcataaagtgtctataataaaactaaactttcatgtg

SEQ ID NO: 1168 - DNA, 3924 bp; single-stranded, linear
  immediate source library: GENBANK
  immediate source clone: g187501
cctgccagacacgcgcgaggttcgaggctgagatggatcttgaggcggcaaagaacggaacagcctggcgccccacgagcgcggagggcgactttgaactgggcatcagcagcaaacaaaaaaggaaaaaaacgaagacagtgaaaatgattggagtattaacattgtttcgatactccgattggcaggataaattgtttatgtcgctgggtaccatcatggccatagctcacggatcaggtctccccctcatgatgatagtatttggagagatgactgacaaatttgttgatactgcaggaaacttctcctttccagtgaacttttccttgtcgctgctaaatccaggcaaaattctggaagaagaaatgactagatatgcatattactactcaggattgggtgctggagttcttgttgctgcctatatacaagtttcattttggactttggcagctggtcgacagatcaggaaaattaggcagaagttttttcatgctattctacgacaggaaataggatggtttgacatcaatgacaccactgaactcaatacgcggctaacagatgacatctccaaaatcagtgaaggaattggtgacaaggttggaatgttctttcaagcagtagccacgttttttgcaggattcatagtgggattcatcagaggatggaagctcacccttgtgataatggccatcagccctattctaggactctctgcagccgtttgggcaaagatactctcggcatttagtgacaaagaactagctgcttatgcaaaagcaggcgccgtggcagaagaggctctgggggccatcaggactgtgatagctttcgggggccagaacaaagagctggaaaggtatcagaaacatttagaaaatgccaaagagattggaattaaaaaagctatttcagcaaacatttccatgggtattgccttcctgttaatatatgcatcatatgcactggccttctggtatggatccactctagtcatatcaaaagaatatactattggaaatgcaatgacagtttttttttcaatcctaattggagctttcagtgttggccaggctgccccatgtattgatgcttttgccaatgcaagaggagcagcatatgtgatctttgatattattgataataatcctaaaattgacagtttttcagagagaggacacaaaccagacagcatcaaagggaatttggagttcaatgatgttcacttttcttacccttctcgagctaacgtcaagatcttgaagggcctcaacctgaaggtgcagagtgggcagacggtggccctggttggaagtagtggctgtgggaagagcacaacggtccagctgatacagaggctctatgaccctgatgagggcacaattaacattgatgggcaggatattaggaactttaatgtaaactatctgagggaaatcattggtgtggtgagtcaggagccggtgctgttttccaccacaattgctgaaaatatttgttatggccgtggaaatgtaaccatggatgagataaagaaagctgtcaaagaggccaacgcctatgagtttatcatgaaattaccacagaaatttgacaccctggttggagagagaggggcccagctgagtggtgggcagaagcagaggatcgccattgcacgtgccctggttcgcaaccccaagatccttctgctggatgaggccacgtcagcattggacacagaaagtgaagctgaggtacaggcagctctggataaggccagagaaggccggaccaccattgtgatagcacaccgactgtctacggtccgaaatgcagatgtcatcgctgggtttgaggatggagtaattgtggagcaaggaagccacagcgaactgatgaagaaggaaggggtgtacttcaaacttgtcaacatgcagacatcaggaagccagatccagtcagaagaatttgaactaaatgatgaaaaggctgccactagaatggccccaaatggctggaaatctcgcctatttaggcattctactcagaaaaaccttaaaaattcacaaatgtgtcagaagagccttgatgtggaaaccgatggacttgaagcaaatgtgccaccagtgtcctttctgaaggtcctgaaactgaataaaacagaatggccctactttgtcgtgggaacagtatgtgccattgccaatggggggcttcagccggcattttcagtcatattctcagagatcatagcgatttttggaccaggcgatgatgcagtgaagcagcagaagtgcaacatattctctttgattttcttatttctgggaattatttctttttttactttcttccttcagggtttcacgtttgggaaagctggcgagatcctcaccagaagactgcggtcaatggcttttaaagcaatgctaagacaggacatgagctggtttgatgaccataaaaacagtactggtgcactttctacaagacttgccacagatgctgcccaagtccaaggagccacaggaaccaggttggctttaattgcacagaatatagctaaccttggaactggtattatcatatcatttatctacggttggcagttaaccctattgctattagcagttgttccaattattgctgtgtcaggaattgttgaaatgaaattgttggctggaaatgccaaaagagataaaaaagaactggaagctgctggaaagattgcaacagaggcaatagaaaatattaggacagttgtgtctttgacccaggaaagaaaatttgaatcaatgtatgttgaaaaattgtatggaccttacaggaattctgtgcagaaggcacacatctatggaattacttttagtatctcacaagcatttatgtatttttcctatgccggttgttttcgatttggtgcatatctcattgtgaatggacatatgcgcttcagagatgttattctggtgttttctgcaattgtatttggtgcagtggctctaggacatgccagttcatttgctccagactatgctaaagctaagctgtctgcagcccacttattcatgctgtttgaaagacaacctctgattgacagctacagtgaagaggggctgaagcctgataaatttgaaggaaatataacatttaatgaagtcgtgttcaactatcccacccgagcaaacgtgccagtgcttcaggggctgagcctggaggtgaagaaaggccagacactagccctggtgggcagcagtggctgtgggaagagcacggtggtccagctcctggagcggttctacgaccccttggcggggacagtgcttctcgatggtcaagaagcaaagaaactcaatgtccagtggctcagagctcaactcggaatcgtgtctcaggagcctatcctatttgactgcagcattgccgagaatattgcctatggagacaacagccgggttgtatcacaggatgaaattgtgagtgcagccaaagctgccaacatacatcctttcatcgagacgttaccccacaaatatgaaacaagagtgggagataaggggactcagctctcaggaggtcaaaaacagaggattgctattgcccgagccctcatcagacaacctcaaatcctcctgttggatgaagctacatcagctctggatactgaaagtgaaaaggttgtccaagaagccctggacaaagccagagaaggccgcacctgcattgtgattgctcaccgcctgtccaccatccagaatgcagacttaatagtggtgtttcagaatgggagagtcaaggagcatggcacgcatcagcagctgctggcacagaaaggcatctatttttcaatggtcagtgtccaggctgggacacagaacttatgaacttttgctacagtatattttaaaaataaattcaaattattctacccatttt

SEQ ID NO: 1169 - DNA, 1093 bp; single-stranded, linear
  immediate source library: GENBANK
  immediate source clone: g187701
ctgcaaggcggcggcaggagaggttgtggtgctagtttctctaagccatccagtgccatcctcgtcgctgcagcgacaccgctctcgccgccgccatgactgagcagatgacccttcgtggcaccctcaagggccacaacggctgggtaacccagatcgctactaccccgcagttcccggacatgatcctctccgcctctcgagataagaccatcatcatgtggaaactgaccagggatgagaccaactatggaattccacagcgtgctctgcggggtcactcccactttgttagtgatgtggttatctcctcagatggccagtttgccctctcaggctcctgggatggaaccctgcgcctctgggatctcacaacgggcaccaccacgaggcgatttgtgggccataccaaggatgtgctgagtgtggccttctcctctgacaaccggcagattgtctctggatctcgagataaaaccatcaagctatggaataccctgggtgtgtgcaaatacactgtccaggatgagagccactcagagtgggtgtcttgtgtccgcttctcgcccaacagcagcaaccctatcatcgtctcctgtggctgggacaagctggtcaaggtatggaacctggctaactgcaagctgaagaccaaccacattggccacacaggctatctgaacacggtgactgtctctccagatggatccctctgtgcttctggaggcaaggatggccaggccatgttatgggatctcaacgaaggcaaacacctttacacgctagatggtggggacatcatcaacgccctgtgcttcagccctaaccgctactggctgtgtgctgccacaggccccagcatcaagatctgggatttagagggaaagatcattgtagatgaactgaagcaagaagttatcagtaccagcagcaaggcagaaccaccccagtgcacttccctggcctggtctgctgatggccagactctgtttgctggctacacggacaacctggtgcgagtgtggcaggtgaccattggcacacgctagaagtttatggcagagctttacaaataaaaaaaaaatggcttttc

SEQ ID NO: 1170 - DNA, 384 bp; single-stranded, linear
  immediate source library: GENBANK
  immediate source clone: g188255
ttcaccccaccagtggtcaatgtcacgtggcttcgaaatggaaaacctgtcaccacaggagtgtcagagacagtcttcctgcccagggaagaccaccttttccgcaagttccactatctccccttcctgccctcaactgaggacgtttacgactgcagggtggagcactggggcttggatgagcctcttctcaagcactgggagtttgatgctccaagccctctcccagagactacagagaacgtggtgtgtgccctgggcctgactgtgggtctggtgggcatcattattgggaccatcttcatcatcaagggattgcgcaaaagcaatgcagcagaacgcagggggcctctgtaaggcacatggaggtgatggtgtttctta

SEQ ID NO: 1171 - DNA, 1287 bp; single-stranded, linear
  immediate source library: GENBANK
  immediate source clone: g188469
ctgcaggggggggggggggggggggggacattggctcttccttggggagtgatgcacaggaggagaagcaggagctgtcgggaagatcagaagccagtcatggatgaccagcgcgaccttatctccaacaatgagcaactgcccatgctgggccggcgccctggggccccggagagcaagtgcagccgcggagccctgtacacaggcttttccatcctggtgactctgctcctcgctggccaggccaccaccgcctacttcctgtaccagcagcagggccggctggacaaactgacagtcacctcccagaacctgcagctggagaacctgcgcatgaagcttcccaagcctcccaagcctgtgagcaagatgcgcatggccaccccgctgctgatgcaggcgctgcccatgggagccctgccccaggggcccatgcagaatgccaccaagtatggcaacatgacagaggaccatgtgatgcacctgctccagaatgctgaccccctgaaggtgtacccgccactgaaggggagcttcccggagaacctgagacaccttaagaacaccatggagaccatagactggaaggtctttgagagctggatgcaccattggctcctgtttgaaatgagcaggcactccttggagcaaaagcccactgacgctccaccgaaagagtcactggaactggaggacccgtcttctgggctgggtgtgaccaagcaggatctgggcccagtccccatgtgagagcagcagaggcggtcttcaacatcctgccagccccacacagctacagctttcttgctcccttcagcccccagcccctcccccatctcccaccctgtacctcatcccatgagaccctggtgcctggctctttcgtcacccttggacaagacaaaccaagtcggaacagcagataacaatgcagcaaggccctgctgcccaatctccatctgtcaacaggggcgtgaggtcccaggaagtggccaaaagctagacagatccccgttcctgacatcacagcagcctccaacacaaggctccaagacctaggctcatggacgagatgggaaggcacagggagaagggataaccctacacccagaccccaggctggacatgctgactgtcctctcccctccagcctttggccttggcttttctagcctatttacctgcaggctgagccactctcttccctttccccagcatcactccccaaggaagagccaatgttttccacccatccctccccccccccccccccccccccccctgcag

SEQ ID NO: 1172 - DNA, 523 bp; single-stranded, linear
  immediate source library: GENBANK
  immediate source clone: g188555
ctcgagctgcagagctgcctctgcgcgggtctcctggtccttctgccatcatgccgatgttcatcgtaaacaccaacgtgccccgcgcctccgtgccggacgggttcctctccgagctcacccagcagctggcgcaggccaccggcaagcccccccagtacatcgcggtgcacgtggtcccggaccagctcatggccttcggcggctccagcgagccgtgcgcgctctgcagcctgcacagcatcggcaagatcggcggcgcgcagaaccgctcctacagcaagctgctgtgcggcctgctggccgagcgcctgcgcatcagcccggacagggtctacatcaactattacgacatgaacgcggccagtgtgggctggaacaactccaccttcgcctaagagccgcagggacccacgctgtctgcgctggctccacccgggaacccgccgcacgctgtgttctaggcccgcccaccccaaccttctggtggggagaaataaacggtttagagacagctctgcag

SEQ ID NO: 1173 - DNA, 1455 bp; single-stranded, linear
  immediate source library: GENBANK
  immediate source clone: g188568
ggcggagttggaagcgcgttacccgggtccaaaatgcccaagaagaagccgacgcccatccagctgaacccggcccccgacggctctgcagttaacgggaccagctctgcggagaccaacttggaggccttgcagaagaagctggaggagctagagcttgatgagcagcagcgaaagcgccttgaggcctttcttacccagaagcagaaggtgggagaactgaaggatgacgactttgagaagatcagtgagctgggggctggcaatggcggtgtggtgttcaaggtctcccacaagccttctggcctggtcatggccagaaagctaattcatctggagatcaaacccgcaatccggaaccagatcataagggagctgcaggttctgcatgagtgcaactctccgtacatcgtgggcttctatggtgcgttctacagcgatggcgagatcagtatctgcatggagcacatggatggaggttctctggatcaagtcctgaagaaagctggaagaattcctgaacaaattttaggaaaagttagcattgctgtaataaaaggcctgacatatctgagggagaagcacaagatcatgcacagagatgtcaagccctccaacatcctagtcaactcccgtggggagatcaagctctgtgactttggggtcagcgggcagctcatcgactccatggccaactccttcgtgggcacaaggtcctacatgtcgccagaaagactccaggggactcattactctgtgcagtcagacatctggagcatgggactgtctctggtagagatggcggttgggaggtatcccatccctcctccagatgccaaggagctggagctgatgtttgggtgccaggtggaaggagatgcggctgagaccccacccaggccaaggacccccgggaggccccttagctcatacggaatggacagccgacctcccatggcaatttttgagttgttggattacatagtcaacgagcctcctccaaaactgcccagtggagtgttcagtctggaatttcaagattttgtgaataaatgcttaataaaaaaccccgcagagagagcagatttgaagcaactcatggttcatgcttttatcaagagatctgatgctgaggaagtggattttgcaggttggctctgctccaccatcggccttaaccagcccagcacaccaacccatgctgctggcgtctaagtgtttgggaagcaacaaagagcgagtcccctgcccggtggtttgccatgtcgcttttgggcctccttcccatgcctgtctctgttcagatgtgcatttcacctgtgacaaaggatgaagaacacagcatgtgccaagattctactcttgtcatttttaatattactgtctttattcttattactattattgttcccctaagtggattggctttgtgcttggggctatttgtgtgtatcc

SEQ ID NO: 1174 - DNA, 1434 bp; single-stranded, linear
  immediate source library: GENBANK
  immediate source clone: g188618
atgaagagtcttccaatcctactgttgctgtgcgtggcagtttgctcagcctatccattggatggagctgcaaggggtgaggacaccagcatgaaccttgttcagaaatatctagaaaactactacgacctcgaaaaagatgtgaaacagtttgttaggagaaaggacagtggtcctgttgttaaaaaaatccgagaaatgcagaagttccttggattggaggtgacggggaagctggactccgacactctggaggtgatgcgcaagcccaggtgtggagttcctgacgttggtcacttcagaacctttcctggcatcccgaagtggaggaaaacccaccttacatacaggattgtgaattatacaccagatttgccaaaagatgctgttgattctgctgttgagaaagctctgaaagtctgggaagaggtgactccactcacattctccaggctgtatgaaggagaggctgatataatgatctcttttgcagttagagaacatggagacttttacccttttgatggacctggaaatgttttggcccatgcctatgcccctgggccagggattaatggagatgcccactttgatgatgatgaacaatggacaaaggatacaacagggaccaatttatttctcgttgctgctcatgaaattggccactccctgggtctctttcactcagccaacactgaagctttgatgtacccactctatcactcactcacagacctgactcggttccgcctgtctcaagatgatataaatggcattcagtccctctatggacctccccctgactcccctgagacccccctggtacccacggaacctgtccctccagaacctgggacgccagccaactgtgatcctgctttgtcctttgatgctgtcagcactctgaggggagaaatcctgatctttaaagacaggcacttttggcgcaaatccctcaggaagcttgaacctgaattgcatttgatctcttcattttggccatctcttccttcaggcgtggatgccgcatatgaagttactagcaaggacctcgttttcatttttaaaggaaatcaattctgggccatcagaggaaatgaggtacgagctggatacccaagaggcatccacaccctaggtttccctccaaccgtgaggaaaatcgatgcagccatttcggataaggaaaagaacaaaacatatttctttgtagaggacaaatactggagatttgatgagaagagaaattccatggagccaggctttcccaagcaaatagctgaagactttccagggattgactcaaagattgatgctgtttttgaagaatttgggttcttttatttctttactggatcttcacagttggagtttgacccaaatgcaaagaaagtgacacacactttgaagagtaacagctggcttaattgttga

SEQ ID NO: 1175 - DNA, 1349 bp; single-stranded, linear
  immediate source library: GENBANK
  immediate source clone: g188623
ggagctgccctcgcgacatgggtcacccgccgctgctgccgctgctgctgctgctccacacctgcgtcccagcctcttggggcctgcggtgcatgcagtgtaagaccaacggggattgccgtgtggaagagtgcgccctgggacaggacctctgcaggaccacgatcgtgcgcttgtgggaagaaggagaagagctggagctggtggagaaaagctgtacccactcagagaagaccaacaggaccctgagctatcggactggcttgaagatcaccagccttaccgaggttgtgtgtgggttagacttgtgcaaccagggcaactctggccgggctgtcacctattcccgaagccgttacctcgaatgcatttcctgtggctcatcagacatgagctgtgagaggggccggcaccagagcctgcagtgccgcagccctgaagaacagtgcctggatgtggtgacccactggatccaggaaggtgaagaagggcgtccaaaggatgaccgccacctccgtggctgtggctaccttcccggctgcccgggctccaatggtttccacaacaacgacaccttccacttcctgaaatgctgcaacaccaccaaatgcaacgagggcccaatcctggagcttgaaaatctgccgcagaatggccgccagtgttacagctgcaaggggaacagcacccatggatgctcctctgaagagactttcctcattgactgccgaggccccatgaatcaatgtctggtagccaccggcactcacgaaccgaaaaaccaaagctatatggtaagaggctgtgcaaccgcctcaatgtgccaacatgcccacctgggtgacgccttcagcatgaaccacattgatgtctcctgctgtactaaaagtggctgtaaccacccagacctggatgtccagtaccgcagtggggctgctcctcagcctggccctgcccatctcagcctcaccatcaccctgctaatgactgccagactgtggggaggcactctcctctggacctaaacctgaaatccccctctctgccctggctggatccggggacccctttgcccttccctcggctcccagccctacagacttgctgtgtgacctcaggccagtgtgccgacctctctgggcctcagttttcccagctatgaaaacagctatctcacaaagttgtgtgaagcagaagagaaaagctggaggaaggccgtgggccaatgggagagctcttgttattattaatattgttgccgctgttgtgttgttgttattaattaatattcatattatttattttatacttacataaagattttgtaccagtaaaaaaaaaaaaaaaaa

SEQ ID NO: 1176 - DNA, 1349 bp; single-stranded, linear
  immediate source library: GENBANK
  immediate source clone: g189050
gagcactggaggccacccagtcatgggggacaccttcatccgtcacatcgccctgctgggctttgagaagcgcttcgtacccagccagcactatgtgtacatgttcctggtgaaatggcaggacctgtcggagaaggtggtctaccggcgcttcaccgagatctacgagttccataaaaccttaaaagaaatgttccctattgaggcaggggcgatcaatccagagaacaggatcatcccccacctcccagctcccaagtggtttgacgggcagcgggccgccgagaaccgccagggcacacttaccgagtactgcagcacgctcatgagcctgcccaccaagatctcccgctgtccccacctcctcgacttcttcaaggtgcgccctgatgacctcaagctccccacggacaaccagacaaaaaagccagagacatacttgatgcccaaagatggcaagagtaccgcgacagacatcaccggccccatcatcctgcagacgtaccgcgccattgccgactacgagaagacctcgggctccgagatggctctgtccacgggggacgtggtggaggtcgtggagaagagcgagagcggttggtggttctgtcagatgaaagcaaagcgaggctggatcccagcatccttcctcgagcccctggacagtcctgacgagacggaagaccctgagcccaactatgcaggtgagccatacgtcgccatcaaggcctacactgctgtggagggggacgaggtgtccctgctcgagggtgaagctgttgaggtcattcacaagctcctggacggctggtgggtcatcaggaaagacgacgtcacaggctactttccgtccatgtacctgcaaaagtcggggcaagacgtgtcccaggcccaacgccagatcaagcggggggcgccgccccgcaggtcgtccatccgcaacgcgcacagcatccatcagcggtcgcggaagcgcctcagccaggacgcctatcgccgcaacagcgtccgttttctgcagcagcgacgccgccaggcgcggccgggaccgcagagccccgggagcccgctcgaggaggagcggcagacgcagcgctctaaaccgcagccggcggtgcccccgcggccgagcgccgacctcatcctgaaccgctgcagcgagagcaccaagcggaagctggcgtctgccgtctgaggctggagcgcagtccccagctagcgtctcggcccttgccgccccgtgcctgtacatacgtgttctatagagcctggcgtctggacgccgagggcagccccgacccctgtccagcgcggctcccgccaccctcaataaatgttgcttggagtgg

SEQ ID NO: 1177 - DNA, 1560 bp; single-stranded, linear
  immediate source library: GENBANK
  immediate source clone: g189066
ccctgagtcactgcctgcgcacgtccggccgcctggctccccatactagtcgccgatatttggagttcttacaacatggcagacattgacaacaaagaacagtctgaacttgatcaagatttggatgatgttgaagaagtagaagaagaggaaactggtgaagaaacaaaactcaaagcacgtcagctaactgttcagatgatgcaaaatcctcagattcttgcagcccttcaagaaagacttgatggtctggtagaaacaccaacaggatacattgaaagcctgcctagggtagttaaaagacgagtgaatgctctcaaaaacctgcaagttaaatgtgcacagatagaagccaaattctatgaggaagttcatgatcttgaaaggaagtatgctgttctctatcagcctctatttgataagcgatttgaaattattaatgcaatttatgaacctacggaagaagaatgtgaatggaaaccagatgaagaagatgagatttcggaggaattgaaagaaaaggccaagattgaagatgagaaaaaggatgaagaaaaagaagaccccaaaggaattcctgaattttggttaactgtttttaagaatgttgacttgctcagtgatatggttcaggaacacgatgaacctattctgaagcacttgaaagatattaaagtgaagttctcagatgctggccagcctatgagttttgtcttagaatttcactttgaacccaatgaatattttacaaatgaagtgctgacaaagacatacaggatgaggtcagaaccagatgattctgatcccttttcttttgatggaccagaaattatgggttgtacagggtgccagatagattggaaaaaaggaaagaatgtcactttgaaaactattaagaagaagcagaaacacaagggacgtgggacagttcgtactgtgactaaaacagtttccaatgactctttctttaacttttttgcccctcctgaagttcctgagagtggagatctggatgatgatgctgaagctatccttgctgcagacttcgaaattggtcactttttacgtgagcgtataatcccaagatcagtgttatattttactggagaagctattgaagatgatgatgatgattatgatgaagaaggtgaagaagcggatgaggaaggggaagaagaaggagatgaggaaaatgatccagactatgacccaaagaaggatcaaaacccagcagagtgcaagcagcagtgaagcaggatgtatgtggccttgaggataacctgcactggtctaccttctgcttccctggaaaggatgaatttacatcatttgacaagcctattttcaagttatttgttgtttgtttgcttgtttttgtttttgcagctaaaataaaaatttcaaatacaattttagttcttacaagataatgtcttaattttgtaccaattcaggtagaagtagaggcctaccttgaattaagggttatactcagtttttaacacattgttgaagaaaaggtaccagctttggaacgagatgctatactaataagcaagt

SEQ ID NO: 1178 - DNA, 4124 bp; single-stranded, linear
  immediate source library: GENBANK
  immediate source clone: g189068
acagccttgaccttatgtcatgggttcaacttggacactgaaaacgcaatgaccttccaagagaacgcaaggggcttcgggcagagcgtggtccagcttcagggatccagggtggtggttggagccccccaggagatagtggctgccaaccaaaggggcagcctctaccagtgcgactacagcacaggctcatgcgagcccatccgcctgcaggtccccgtggaggccgtgaacatgtccctgggcctgtccctggcagccaccaccagcccccctcagctgctggcctgtggtcccaccgtgcaccagacttgcagtgagaacacgtatgtgaaagggctctgcttcctgtttggatccaacctacggcagcagccccagaagttcccagaggccctccgagggtgtcctcaagaggatagtgacattgccttcttgattgatggctctggtagcatcatcccacatgactttcggcggatgaaggagtttgtctcaactgtgatggagcaattaaaaaagtccaaaaccttgttctctttgatgcagtactctgaagaattccggattcactttaccttcaaagagttccagaacaaccctaacccaagatcactggtgaagccaataacgcagctgcttgggcggacacacacggccacgggcatccgcaaagtggtacgagagctgtttaacatcaccaacggagcccgaaagaatgcctttaagatcctagttgtcatcacggatggagaaaagtttggcgatcccttgggatatgaggatgtcatccctgaggcagacagagagggagtcattcgctacgtcattggggtgggagatgccttccgcagtgagaaatcccgccaagagcttaataccatcgcatccaagccgcctcgtgatcacgtgttccaggtgaataactttgaggctctgaagaccattcagaaccagcttcgggagaagatctttgcgatcgagggtactcagacaggaagtagcagctcctttgagcatgagatgtctcaggaaggcttcagcgctgccatcacctctaatggccccttgctgagcactgtggggagctatgactgggctggtggagtctttctatatacatcaaaggagaaaagcaccttcatcaacatgaccagagtggattcagacatgaatgatgcttacttgggttatgctgccgccatcatcttacggaaccgggtgcaaagcctggttctgggggcacctcgatatcagcacatcggcctggtagcgatgttcaggcagaacactggcatgtgggagtccaacgctaatgtcaagggcacccagatcggcgcctacttcggggcctccctctgctccgtggacgtggacagcaacggcagcaccgacctggtcctcatcggggccccccattactacgagcagacccgagggggccaggtgtccgtgtgccccttgcccagggggcagagggctcggtggcagtgtgatgctgttctctacggggagcagggccaaccctggggccgctttggggcagccctaacagtgctgggggacgtaaatggggacaagctgacggacgtggccattggggccccaggagaggaggacaaccggggtgctgtttacctgtttcacggaacctcaggatctggcatcagcccctcccatagccagcggatagcaggctccaagctctctcccaggctccagtattttggtcagtcactgagtgggggccaggacctcacaatggatggactggtagacctgactgtaggagcccaggggcacgtgctgctgctcaggtcccagccagtactgagagtcaaggcaatcatggagttcaatcccagggaagtggcaaggaatgtatttgagtgtaatgatcaggtggtgaaaggcaaggaagccggagaggtcagagtctgcctccatgtccagaagagcacacgggatcggctaagagaaggacagatccagagtgttgtgacttatgacctggctctggactccggccgcccacattcccgcgccgtcttcaatgagacaaagaacagcacacgcagacagacacaggtcttggggctgacccagacttgtgagaccctgaaactacagttgccgaattgcatcgaggacccagtgagccccattgtgctgcgcctgaacttctctctggtgggaacgccattgtctgctttcgggaacctccggccagtgctggcggaggatgctcagagactcttcacagccttgtttccctttgagaagaattgtggcaatgacaacatctgccaggatgacctcagcatcaccttcagtttcatgagcctggactgcctcgtggtgggtgggccccgggagttcaacgtgacagtgactgtgagaaatgatggtgaggactcctacaggacacaggtcaccttcttcttcccgcttgacctgtcctaccggaaggtgtccacgctccagaaccagcgctcacagcgatcctggcgcctggcctgtgagtctgcctcctccaccgaagtgtctggggccttgaagagcaccagctgcagcataaaccaccccatcttcccggaaaactcagaggtcacctttaatatcacgtttgatgtagactctaaggcttcccttggaaacaaactgctcctcaaggccaatgtgaccagtgagaacaacatgcccagaaccaacaaaaccgaattccaactggagctgccggtgaaatatgctgtctacatggtggtcaccagccatggggtctccactaaatatctcaacttcacggcctcagagaataccagtcgggtcatgcagcatcaatatcaggtcagcaacctggggcagaggagcctccccatcagcctggtgttcttggtgcccgtccggctgaaccagactgtcatatgggaccgcccccaggtcaccttctccgagaacctctcgagtacgtgccacaccaaggagcgcttgccctctcactccgactttctggctgagcttcggaaggcccccgtggtgaactgctccatcgctgtctgccagagaatccagtgtgacatcccgttctttggcatccaggaagaattcaatgctaccctcaaaggcaacctctcgtttgactggtacatcaagacctcgcataaccacctcctgatcgtgagcacagctgagatcttgtttaacgattccgtgttcaccctgctgccgggacagggggcgtttgtgaggtcccagacggagaccaaagtggagccgttcgaggtccccaaccccctgccgctcatcgtgggcagctctgtcgggggactgctgctcctggccctcatcaccgccgcgctgtacaagctcggcttcttcaagcggcaatacaaggacatgatgagtgaagggggtcccccgggggccgaaccccagtagcggctccttcccgacagagctgcctctcggtggccagcaggactctgcccagaccacacgtagcccccaggctgctggacacgtcggacagcgaagtatccccgacaggacgggcttgggcttccatttgtgtgtgtgcaagtgtgtatgtgcgtgtgtgcgagtgtgtgcaagtgtctgtgtgcaagtgtgtgcacgtgtcggtgtgcgtgcatgtgcactcgcacgcccatgtgtgagtgtgtgcaagtatgtgagtgtgtccaagtgtgtgtgcgtgtgtccatgtgtgtgcaagtgtgtgcatgtgtgcgagtgtgtgcatgtgtgtgctcaggggcgtgtggctcacgtgtgtgactcagatgtctctggcgtgtgggtaggtgacggccagcgtagcctctccggcagaagggaactgcctgggctcccttgtgcgtgggtgaagccgctgctgggttttcctccgggagaggggacggtcaatcctgtgggtgaagacagagggaaacacagcagcttctctccactgaaagaagtgggacttcccgtcgcctgcagcctgcggcctgctggagcctgcgcagcttggatggagactccatgagaagccgtgggtggaaccaggagcctcctccacaccagcgctgatgcccaataaagatgcccactgaggaatgatg

SEQ ID NO: 1179 - DNA, 687 bp; single-stranded, linear
  immediate source library: GENBANK
  immediate source clone: g189105
gcagtgtcccagccgggttcgtgtcgccatggggcagatcgagtgggccatgtgggccaacgagcaggcgctggcgtccggcctgatcctcatcaccgggggcatcgtggccacagctgggcgcttcacccagtggtactttggtgcctactccattgtggcgggcgtgtttgtgtgcctgctggagtacccccgggggaagaggaagaagggctccaccatggagcgctggggacagaagcacatgaccgccgtggtgaagctgttcgggccctttaccaggaattactatgttcgggccgtcctgcatctcctgctctcggtgcccgccggcttcctgctggccaccatccttgggaccgcctgcctggccattgcgagcggcatctacctactggcggctgtgcgtggcgagcagtggacgcccatcgagcccaagccccgggagcggccgcagatcggaggcaccatcaagcagccgcccagcaaccccccgccgcggcccccggccgaggcccgcaagaagcccagcgaggaggaggctgcggcggcggcggggggacccccgggaggtccccaggtcaaccccatcccggtgaccgacgaggtcgtgtgacctcgccccggacctgccctcccaccaggtgcacccacctgcaataaacgcagcgaaggccgggaaaaaaa

SEQ ID NO: 1180 - DNA, 3625 bp; single-stranded, linear
  immediate source library: GENBANK
  immediate source clone: g189177
ggccaccggagcggcccggcgacgatcgctgacagcttcccctgcccttcccgtcggtcgggccgccagccgccgcagccctcggcctgcacgcagccaccggccccgctcccggagcccagcgccgccgaggccgcagccgcccggccagtaaggcggcgccgcccgcggccaccgcgggccctgccgttccctccgccgcgctgcgccatggcgcggcgctgactggcctggcccggccccgccgcgctcccgctcgccccgacccgcactcgggcccgcccgggctccggcctgccgccgcctcttccttctccagccggcaggccccgccgcttaggagggagagcccacccgcgccaggaggccgaacgcggactcgccacccggcttcagaatggcagaagatgatccatatttgggaaggcctgaacaaatgtttcatttggatccttctttgactcatacaatatttaatccagaagtatttcaaccacagatggcactgccaacagatggcccataccttcaaatattagagcaacctaaacagagaggatttcgtttccgttatgtatgtgaaggcccatcccatggtggactacctggtgcctctagtgaaaagaacaagaagtcttaccctcaggtcaaaatctgcaactatgtgggaccagcaaaggttattgttcagttggtcacaaatggaaaaaatatccacctgcatgcccacagcctggtgggaaaacactgtgaggatgggatctgcactgtaactgctggacccaaggacatggtggtcggcttcgcaaacctgggtatacttcatgtgacaaagaaaaaagtatttgaaacactggaagcacgaatgacagaggcgtgtataaggggctataatcctggactcttggtgcaccctgaccttgcctatttgcaagcagaaggtggaggggaccggcagctgggagatcgggaaaaagagctaatccgccaagcagctctgcagcagaccaaggagatggacctcagcgtggtgcggctcatgtttacagcttttcttccggatagcactggcagcttcacaaggcgcctggaacccgtggtatcagacgccatctatgacagtaaagcccccaatgcatccaacttgaaaattgtaagaatggacaggacagctggatgtgtgactggaggggaggaaatttatcttctttgtgacaaagttcagaaagatgacatccagattcgattttatgaagaggaagaaaatggtggagtctgggaaggatttggagatttttcccccacagatgttcatagacaatttgccattgtcttcaaaactccaaagtataaagatattaatattacaaaaccagcctctgtgtttgtccagcttcggaggaaatctgacttggaaactagtgaaccaaaacctttcctctactatcctgaaatcaaagataaagaagaagtgcagaggaaacgtcagaagctcatgcccaatttttcggatagtttcggcggtggtagtggtgccggagctggaggcggaggcatgtttggtagtggcggtggaggagggggcactggaagtacaggtccagggtatagcttcccacactatggatttcctacttatggtgggattactttccatcctggaactactaaatctaatgctgggatgaagcatggaaccatggacactgaatctaaaaaggaccctgaaggttgtgacaaaagtgatgacaaaaacactgtaaacctctttgggaaagttattgaaaccacagagcaagatcaggagcccagcgaggccaccgttgggaatggtgaggtcactctaacgtatgcaacaggaacaaaagaagagagtgctggagttcaggataacctctttctagagaaggctatgcagcttgcaaagaggcatgccaatgcccttttcgactacgcggtgacaggagacgtgaagatgctgctggccgtccagcgccatctcactgctgtgcaggatgagaatggggacagtgtcttacacttagcaatcatccaccttcattctcaacttgtgagggatctactagaagtcacatctggtttgatttctgatgacattatcaacatgagaaatgatctgtaccagacgcccttgcacttggcagtgatcactaagcaggaagatgtggtggaggatttgctgagggctggggccgacctgagccttctggaccgcttgggtaactctgttttgcacctagctgccaaagaaggacatgataaagttctcagtatcttactcaagcacaaaaaggcagcactacttcttgaccaccccaacggggacggtctgaatgccattcatctagccatgatgagcaatagcctgccatgtttgctgctgctggtggccgctggggctgacgtcaatgctcaggagcagaagtccgggcgcacagcactgcacctggctgtggagcacgacaacatctcattggcaggctgcctgctcctggagggtgatgcccatgtggacagtactacctacgatggaaccacacccctgcatatagcagctgggagagggtccaccaggctggcagctcttctcaaagcagcaggagcagatcccctggtggagaactttgagcctctctatgacctggatgactcttgggaaaatgcaggagaggatgaaggagttgtgcctggaaccacgcctctagatatggccaccagctggcaggtatttgacatattaaatgggaaaccatatgagccagagtttacatctgatgatttactagcacaaggagacatgaaacagctggctgaagatgtgaagctgcagctgtataagttactagaaattcctgatccagacaaaaactgggctactctggcgcagaaattaggtctggggatacttaataatgccttccggctgagtcctgctccttccaaaacacttatggacaactatgaggtctctgggggtacagtcagagagctggtggaggccctgagacaaatgggctacaccgaagcaattgaagtgatccaggcagcctccagcccagtgaagaccacctctcaggcccactcgctgcctctctcgcctgcctccacaaggcagcaaatagacgagctccgagacagtgacagtgtctgcgacacgggcgtggagacatccttccgcaaactcagctttaccgagtctctgaccagtggtgcctcactgctaactctcaacaaaatgccccatgattatgggcaggaaggacctctagaaggcaaaatttagcctgctgacaatttcccacaccgtgtaaaccaaagccctaaaattccactgcgttgtccacaagacagaagctgaagtgcatccaaaggtgctcagagagccggcccgcctgaatcattctcgatttaactcgagaccttttcaacttggcttcctttcttggttcataaatgaattttagtttggttcacttacagatagtatctagcaatcacaacactggctgagcggatgcatctggggatgaggttgcttactaagctttgccagctgctgctggatcacagctgctttctgttgtcattgctgttgtccctctgc

SEQ ID NO: 1181 - DNA, 1987 bp; single-stranded, linear
  immediate source library: GENBANK
  immediate source clone: g189237
ctcgagagctccgccatggccgctctcacccgggacccccagttccagaagctgcagcaatggtaccgcgagcaccgctccgagctgaacctgcgccgcctcttcgatgccaacaaggaccgcttcaaccacttcagcttgaccctcaacaccaaccatgggcatatcctggtggattactccaagaacctggtgacggaggacgtgatgcggatgctggtggacttggccaagtccaggggcgtggaggccgcccgggagcggatgttcaatggtgagaagatcaactacaccgagggtcgagccgtgctgcacgtggctctgcggaaccggtcaaacacacccatcctggtagacggcaaggatgtgatgccagaggtcaacaaggttctggacaagatgaagtctttctgccagcgtgtccggagcggtgactggaaggggtacacaggcaagaccatcacggacgtcatcaacattggcattgtcggctccgacctgggacccctcatggtgactgaagcccttaagccatactcttcaggaggtccccgcgtctggtatgtctccaacattgatggaactcacattgccaaaaccctggcccagctgaacccggagtcctccctgttcatcattgcctccaagacctttactacccaggagaccatcacgaatgcagagacggcgaaggagtggtttctccaggcggccaaggatccttctgcagtggcgaagcactttgttgccctgtctactaacacaaccaaagtgaaggagtttggaattgaccctcaaaacatgttcgagttctgggattgggtgggaggacgctactcgctgtggtcggccatcggactctccattgccctgcacgtgggttttgacaacttcgagcagctgctctcgggggctcactggatggaccagcacttccgcacgacgcccctggagaagaacgcccccgtcttgctggccctgctgggtatctggtacatcaactgctttgggtgtgagacacacgccatgctgccctatgaccagtacctgcaccgctttgctgcgtacttccagcagggcgacatggagtccaatgggaaatacatcaccaaatctggaacccgtgtggaccaccagacaggccccattgtgtggggggagccagggaccaatggccagcatgctttttaccagctcatccaccaaggcaccaagatgataccctgtgacttcctcatcccggtccagacccagcaccccatacggaagggtctgcatcacaagatcctcctggccaacttcttggcccagacagaggccctgatgaggggaaaatcgacggaggaggcccgaaaggagctccaggctgcgggcaagagtccagaggaccttgagaggctgctgccacataaggtctttgaaggaaatcgcccaaccaactctattgtgttcaccaagctcacaccattcatgcttggagccttggtcgccatgtatgagcacaagatcttcgttcagggcatcatctgggacatcaacagctttgaccagtggggagtggagctgggaaagcagctggctaagaaaatagagcctgagcttgatggcagtgctcaagtgacctctcacgacgcttctaccaatgggctcatcaacttcatcaagcagcagcgcgaggccagagtccaataaactcgtgctcatctgcagcctcctctgtgactcccctttctcttctcgtccctcctccccggagccggcactgcatgttcctggacaccacccagagcaccctctggttgtgggcttggaccacgagcccttagcagggaaggctggtctcccccagcctaacccccagcccctccatgtctatgctccctctgtgttagaattggctgaagtgtttttgtgcagctgacttttctgacccatgttcacgttgttcacatcccatgtagaaaaacaaagatgccacggaggaggt

SEQ ID NO: 1182 - DNA, 1284 bp; single-stranded, linear
  immediate source library: GENBANK
  immediate source clone: g189243
agctccgagcccccgagctgggtcacggagatgctgcttgagaacgagctgtggggcagcccggccgaggaggacgcgttcggcctggggggactgggtggcctcacccccaacccggtcatcctccaggactgcatgtggagcggcttctccgcccgcgagaagctggagcgcgccgtgagcgagaagctgcagcacggccgcgggccgccaaccgccggttccaccgcccagtccccgggagccggcgccgccagccctgcgggtcgcgggcacggcggggctgcgggagccggccgcgccggggccgccctgcccgccgagctcgcccacccggccgccgagtgcgtggatcccgccgtggtcttcccctttcccgtgaacaagcgcgagccagcgcccgtgcccgcagccccggccagtgccccggcggcgggccctgcggtcgcctcgggggcgggtattgccgccccagccggggccccgggggtcgcccctccgcgcccaggcggccgccagaccagcggcggcgaccacaaggccctcagtacctccggagaggacaccctgagcgattcagatgatgaagatgatgaagaggaagatgaagaggaagaaatcgacgtggtcactgtggagaagcggcgttcctcctccaacaccaaggctgtcaccacattcaccatcactgtgcgtcccaagaacgcagccctgggtcccgggagggctcagtccagcgagctgatcctcaaacgatgccttcccatccaccagcagcacaactatgccgccccctccccctacgtggagagtgaggatgcacccccacagaagaagataaagagcgaggcgtccccacgtccgctcaagagtgtcatccccccaaaggctaagagcttgagcccccgaaactctgactcggaggacagtgagcgtcgcagaaaccacaacatcctggagcgccagcgccgcaacgaccttcggtccagctttctcacgctcagggaccacgtgccggagttggtaaagaatgagaaggccgccaaggtggtcattttgaaaaaggccactgagtatgtccactccctccaggccgaggagcaccagcttttgctggaaaaggaaaaattgcaggcaagacagcagcagttgctaaagaaaattgaacacgctcggacttgctagacgcttctcaaaactggacagtcactgccactttgcacattttgattttttttttaaacaaacattgtgttgacattaagaatgttggtttactttcaa

SEQ ID NO: 1183 - DNA, 2206 bp; single-stranded, linear
  immediate source library: GENBANK
  immediate source clone: g189267
ctagtctttcagccttcaggctgtttttggcttgaagctctcttggcctcctagtttctacctaatcatgtccctggtggaggccatcagcctctggaatgaaggggtgctggcagcggacaagaaggactggaagggagccctggatgccttcagtgccgtccaggacccccactcccggatttgcttcaacattggctgcatgtacactatcctgaagaacatgactgaagcagagaaggcctttaccagaagcattaaccgagacaagcacttggcagtggcttacttccaacgagggatgctctactaccagacagagaaatatgatttggctatcaaagaccttaaagaagccttgattcagcttcgagggaaccagctgatagactataagatcctggggctccagttcaagctgtttgcctgtgaggtgttatataacattgctttcatgtatgccaagaaggaggaatggaaaaaagctgaagaacagttagcattggccacgagcatgaagtctgagcccagacattccaaaatcgacaaggcgatggagtgtgtctggaagcagaagctatatgagccagtggtgatccctgtgggcaagctgtttcgaccaaatgagagacaagtggctcagctggccaagaaggattacctaggcaaggcgacggtcgtggcatctgtggtggatcaagacagtttctctgggtttgcccctctgcaaccacaggcagctgagcctccacccagaccgaaaaccccagagatcttcagggctctggaaggggaggctcaccgtgtgctatttgggtttgtgcctgagacaaaagaagagctccaggtcatgccagggaacattgtctttgtcttgaagaagggcaatgataactgggccacggtcatgttcaacgggcagaaggggcttgttccctgcaactaccttgaaccagttgagttgcggatccaccctcagcagcagccccaggaggaaagctctccgcagtccgacatcccagctcctcctagttccaaagcccctggaaaaccccagctgtcaccaggccagaaacaaaaagaagagcctaaggaagtgaagctcagtgttcccatgccctacacactcaaggtgcactacaagtacacggtagtcatgaagactcagcccgggctcccctacagccaggtccgggacatggtgtctaagaaactggagctccggctggaacacactaagctgagctatcggcctcgggacagcaatgagctggtgcccctttcagaagacagcatgaaggatgcctggggccaggtgaaaaactactgcctgactctgtggtgtgagaacacagtgggtgaccaaggctttccagatgaacccaaggaaagtgaaaaagctgatgctaataaccagacaacagaacctcagcttaagaaaggcagccaagtggaggcactcttcagttatgaggctacccaaccagaggacctggagtttcaggaaggggatataatcctggtgttatcaaaggtgaatgaagaatggctggaaggggagtgcaaagggaaggtgggcattttccccaaagtttttgttgaagactgcgcaactacagatttggaaagcactcggagagaagtctaggatgtttcacaaactacaaagctgaagaaaatgaagccctattacttgtttgtaagatttagcacccttctgctgtatactgtactgagacattacagtttggaagtgttaactatttattccctgttaaaatttaacctactagacaatgatgtgagtacccaggatgatttcctggggcacagtgggtgaggagatggggacaggtgaatggaggagttaggggagaggaaaagtggatggaagtgtctggaaagggcacgagagagtcttccaggtactgatcctgtttcttgctctgagtgctagctagccagctgtgttcacactgtaaacattcatcaagctgtacatttggtgcacttttctgtgtcataccacaataaaaaaaaacctatcatcatcttacaaaaacaagacacccaagtccaggcccaaggagtaagtacaaatattcctgtttctgaaccattactgtaattggctcttaaggcttgaagtaaccttataggttactcataaggcatatacaaataaacttgtttgttttcttttttc

SEQ ID NO: 1184 - DNA, 1815 bp; single-stranded, linear
  immediate source library: GENBANK
  immediate source clone: g189368
gaattcctggagagttgcctttgtgagaagctggaaatatttctttcaattccatctcttagttttccataggaacatcaagaaatcatgaacaactttggtaatgaagagtttgactgccacttcctcgatgaaggttttactgccaaggacattctggaccagaaaattaatgaagtttcttcttctgatgataaggatgccttctatgtggcagacctgggagacattctaaagaaacatctgaggtggttaaaagctctccctcgtgtcacccccttttatgcagtcaaatgtaatgatagcaaagccatcgtgaagacccttgctgctaccgggacaggatttgactgtgctagcaagactgaaatacagttggtgcagagtctgggggtgcctccagagaggattatctatgcaaatccttgtaaacaagtatctcaaattaagtatgctgctaataatggagtccagatgatgacttttgatagtgaagttgagttgatgaaagttgccagagcacatcccaaagcaaagttggttttgcggattgccactgatgattccaaagcagtctgtcgtctcagtgtgaaattcggtgccacgctcagaaccagcaggctccttttggaacgggcgaaagagctaaatatcgatgttgttggtgtcagcttccatgtaggaagcggctgtaccgatcctgagaccttcgtgcaggcaatctctgatgcccgctgtgtttttgacatgggggctgaggttggtttcagcatgtatctgcttgatattggcggtggctttcctggatctgaggatgtgaaacttaaatttgaagagatcaccggcgtaatcaacccagcgttggacaaatactttccgtcagactctggagtgagaatcatagctgagcccggcagatactatgttgcatcagctttcacgcttgcagttaatatcattgccaagaaaattgtattaaaggaacagacgggctctgatgacgaagatgagtcgagtgagcagacctttatgtattatgtgaatgatggcgtctatggatcatttaattgcatactctatgaccacgcacatgtaaagccccttctgcaaaagagacctaaaccagatgagaagtattattcatccagcatatggggaccaacatgtgatggcctcgatcggattgttgagcgctgtgacctgcctgaaatgcatgtgggtgattggatgctctttgaaaacatgggcgcttacactgttgctgctgcctctacgttcaatggcttccagaggccgacgatctactatgtgatgtcagggcctgcgtgggaactcatgcagcaattccagaaccccgacttcccacccgaagtagaggaacaggatgccagcaccctgcctgtgtcttgtgcctgggagagtgggatgaaacgccacagagcagcctgtgcttcggctagtattaatgtgtagatagcactctggtagctgttaactgcaagtttagcttgaattaagggatttggggggaccatgtaacttaattactgctagttttgaaatgtctttgtaagagtagggtcgccatgatgcagccatatggaagactagcatatgggtcacacttatctgtgttcctatggaaactatttgaatatttgttttatatggatttttattcactcttcagacacgctactcaagagtgcccctcagctgctgaacaagcatttgtagcttgtacaatggcagaatgggccaaaagcttagtgttgtgacctgtttttaaaataaagtatcttgaaataattaggc

SEQ ID NO: 1185 - DNA, 3175 bp; single-stranded, linear
  immediate source library: GENBANK
  immediate source clone: g189501
ggttcctggtcatacaccagtactaccaaggacagcttttttcctgcaagatctgttacctaaagcaataaaaaatggccagaggatcagtgtccgatgaggaaatgatggagctcagagaagcttttgccaaagttgatactgatggcaatggatacatcagcttcaatgagttgaatgacttgttcaaggctgcttgcttgcctttgcctgggtatagagtacgagaaattacagaaaacctgatggctacaggtgatctggaccaagatggaaggatcagctttgatgagtttatcaagattttccatggcctaaaaagcacagatgttgccaagacctttagaaaagcaatcaataagaaggaagggatttgtgcaatcggtggtacttcagagcagtctagcgttggcacccaacactcctattcagaggaagaaaagtatgcctttgtcaactggataaacaaagccctggaaaatgatcctgattgtcggcatgtcatcccaatgaacccaaacacgaatgatctctttaatgctgttggagatggcattgtcctttgtaaaatgatcaacctgtcagtgccagacacaattgatgaaagaacaatcaacaaaaagaagctaacccctttcaccattcaggaaaatctgaacttggctctgaactctgcctcagccatcgggtgccatgtggtcaacataggggctgaggacctgaaggaggggaagccttatctggtcctgggacttctgtggcaagtcatcaagattgggttgtttgctgacattgaactcagcagaaatgaagctctgattgctcttttgagagaaggtgagagcctggaggatttgatgaaactctcccctgaagagctcttgctgaggtgggctaattaccacctggaaaatgcaggctgcaacaaaattggcaacttcagtactgacatcaaggactcaaaagcttattaccacctgcttgagcaggtggctccaaaaggagatgaagaaggtgttcctgctgttgttattgacatgtcaggactgcgggagaaggatgacatccagagggcagaatgcatgctgcagcaggcggagaggctgggctgccggcagtttgtcacagccacagatgttgtccgagggaaccccaagttgaacttggcttttattgccaacctctttaacagataccctgccctgcacaaaccagagaaccaggacattgactggggggctcttgaaggtgagacgagagaagagcggacatttaggaactggatgaactccctgggtgttaaccctcgagtcaatcatttgtacagtgacttatcagatgccctggtcatcttccagctctatgaaaagatcaaagttcctgttgactggaacagagtaaacaaaccgccataccccaaactgggaggcaatatgaagaagcttgagaattgtaactacgcggtagaattggggaagaatcaagcgaagttctccctggttggcatcggtggacaagatctcaatgaaggaaaccgcactctcacactggccttgatttggcagctaatgagaaggtatacactgaatatcctcgaagaaattggtggtggccagaaggtcaatgatgacattattgtcaactgggtgaatgaaacattgagggaagcagagaaaagttcatccatctctagtttcaaggacccgaagattagtacaagtctgcctgttctggacctcatcgatgccatccaaccaggttccattaactatgaccttctgaagacagaaaatctgaatgatgatgagaaactcaacaatgcaaaatatgccatctctatggcccgaaaaattggagcaagagtgtatgccctgccagaagacctggttgaagtgaaccccaaaatggtcatgaccgtgtttgcctgcctcatggggaaaggaatgaagagggtgtgaggccaatggggctgggtgggaggcggtgcactcactcctgactgcccggcacagatgctccagggatgattcaagccattccaaagttcaacttggtgacactctataagattccaaaaagcacatattagtgcagccaagtagcctctcctgtatttaacaaaaagtgcttcattctttgcaggaggcccaacctcctatatataggtttctattcttgatttatttgcttcttcgaaaatctagaggaaaagaaagaagttattttccaggtacccttctcgcttttgccattagccaaggatagaagctgcagtggtattaattttgatataatctttcaaaccagcttgttgtggcttcccttttctttgttcaagatgagggccaggaggggaaacatcacacctgccctaaaccctgttcctggaggtcagcatttgatctgttgcaagcccctctttctgtcccctcttcctaccctgcctcccatgactttgctcctcacacttttggaaccatgccttccgggggggcccatctcttctggcggtccttgtctctgggccacttggagtgtgtgataaatcagtcaagctgttgaagtctcaggagtctctggtagcctgcagaagtaagcctcatcatcagagcctttcctcaaaactggagtcccaaatgtcatcaggttttgttttttttcagccactaagaacccctctgcttttaactctagaatttgggcttggaccagatctaacatcttgaatactctgccctctagagccttcagccttaatggaaggttggatccaaggaggtgtaatggaatcggaatcaagccactcggcaggcatggagctataactaagcatccttagggttctgcctctccaggcattagccctcacattagatctagttactgtggtatggctaatacctgtcaacatttggaggcaatcctaccttgcttttgcttctagagcttagcatatctgattgttgtcaggccatattatcaatgtttacttttttggtactataaaagctttctgccacccctaaactccaggggggacaatatgtgccaatcaatagcacccctactcacatacacacacacctagccagctgtcaagggcagaatgaatctatgctggataagaaatggtggaactgcgttatgaagagctaatttactggacaaagaattc

SEQ ID NO: 1186 - DNA, 1551 bp; single-stranded, linear
  immediate source library: GENBANK
  immediate source clone: g189537
ctggtggcctttaatacctggctgttgctgaaaggtctttagaaacggcgctaacagcaggtttgtggaatgccggatcgctcaacggcctgacgtgggcaaaaacctcgccttccgcacccatcattatattgatgctcattgccgccgccttactggtacgccggatgcgcttgctggaaatgggacacacggtcactgcagctgaagccgctgcccctgctacaggcaccaccaggaccagctgatcattccagcccacagcaatggagccacatgactcctcccacatggactctgagttccgatacactctcttcccgattgtttacagcatcatctttgtgctcggggtcattgctaatggctacgtgctgtgggtctttgcccgcctgtacccttgcaagaaattcaatgagataaagatcttcatggtgaacctcaccatggcggacatgctcttcttgatcaccctgccactttggattgtctactaccaaaaccagggcaactggatactccccaaattcctgtgcaacgtggctggctgccttttcttcatcaacacctactgctctgtggccttcctgggcgtcatcacttataaccgcttccaggcagtaactcggcccatcaagactgctcaggccaacacccgcaagcgtggcatctctttgtccttggtcatctgggtggccattgtgggagctgcatcctacttcctcatcctggactccaccaacacagtgcccgacagtgctggctcaggcaacgtcactcgctgctttgagcattacgagaagggcagcgtgccagtcctcatcatccacatcttcatcgtgttcagcttcttcctggtcttcctcatcatcctcttctgcaacctggtcatcatccgtaccttgctcatgcagccggtgcagcagcagcgcaacgctgaagtcaagcgccgggcgctgtggatggtgtgcacggtcttggcggtgttcatcatctgcttcgtgccccaccacgtggtgcagctgccctggacccttgctgagctgggcttccaggacagcaaattccaccaggccattaatgatgcacatcaggtcaccctctgcctccttagcaccaactgtgtcttagaccctgttatctactgtttcctcaccaagaagttccgcaagcacctcaccgaaaagttctacagcatgcgcagtagccggaaatgctcccgggccaccacggatacggtcactgaagtggttgtgccattcaaccagatccctggcaattccctcaaaaattagtccctgcttccaggcctgaagtcttctcctccatgaacatcatggactgagctgggggaagaagggatatctactgtggtctgggcaccacctctgtgggcactggtgggccattagatttggaggctacctcacctgggcagggatgatggcagagccaggctgttggaaaatccagaactcaaatgagccccttcatccgcctgtggggcatactacagtaactgtgacttgatgactttatctgagtccttat

SEQ ID NO: 1187 - DNA, 2876 bp; single-stranded, linear
  immediate source library: GENBANK
  immediate source clone: g189541
gaattcctgcagctcagcagccgccgccagagcaggacgaaccgccaatcgcaaggcacctctgagaacttcaggatgcagatgtctccagccctcacctgcctagtcctgggcctggcccttgtctttggtgaagggtctgctgtgcaccatcccccatcctacgtggcccacctggcctcagacttcggggtgagggtgtttcagcaggtggcgcaggcctccaaggaccgcaacgtggttttctcaccctatggggtggcctcggtgttggccatgctccagctgacaacaggaggagaaacccagcagcagattcaagcagctatgggattcaagattgatgacaagggcatggcccccgccctccggcatctgtacaaggagctcatggggccatggaacaaggatgagatcagcaccacagacgcgatcttcgtccagcgggatctgaagctggtccagggcttcatgccccacttcttcaggctgttccggagcacggtcaagcaagtggacttttcagaggtggagagagccagattcatcatcaatgactgggtgaagacacacacaaaaggtatgatcagcaacttgcttgggaaaggagccgtggaccagctgacacggctggtgctggtgaatgccctctacttcaacggccagtggaagactcccttccccgactccagcacccaccgccgcctcttccacaaatcagacggcagcactgtctctgtgcccatgatggctcagaccaacaagttcaactatactgagttcaccacgcccgatggccattactacgacatcctggaactgccctaccacggggacaccctcagcatgttcattgctgccccttatgaaaaagaggtgcctctctctgccctcaccaacattctgagtgcccagctcatcagccactggaaaggcaacatgaccaggctgccccgcctcctggttctgcccaagttctccctggagactgaagtcgacctcaggaagcccctagagaacctgggaatgaccgacatgttcagacagtttcaggctgacttcacgagtctttcagaccaagagcctctccacgtcgcgcaggcgctgcagaaagtgaagatcgaggtgaacgagagtggcacggtggcctcctcatccacagctgtcatagtctcagcccgcatggcccccgaggagatcatcatggacagacccttcctctttgtggtccggcacaaccccacaggaacagtccttttcatgggccaagtgatggaaccctgaccctggggaaagacgccttcatctgggacaaaactggagatgcatcgggaaagaagaaactccgaagaaaagaattttagtgttaatgactctttctgaaggaagagaagacatttgccttttgttaaaagatggtaaaccagatctgtctccaagaccttggcctctccttggaggacctttaggtcaaactccctagtctccacctgagaccctgggagagaagtttgaagcacaactcccttaaggtctccaaaccagacggtgacgcctgcgggaccatctggggcacctgcttccacccgtctctctgcccactcgggtctgcagacctggttcccactgaggccctttgcaggatggaactacggggcttacaggagcttttgtgtgcctggtagaaactatttctgttccagtcacattgccatcactcttgtactgcctgccaccgcggaggaggctggtgacaggccaaaggccagtggaagaaacaccctttcatctcagagtccactgtggcactggccacccctccccagtacaggggtgctgcaggtggcagagtgaatgtcccccatcatgtggcccaactctcctggcctggccatctccctccccagaaacagtgtgcatgggttattttggagtgtaggtgacttgtttactcattgaagcagatttctgcttccttttatttttataggaatagaggaagaaatgtcagatgcgtgcccagctcttcaccccccaatctcttggtggggaggggtgtacctaaatatttatcatatccttgcccttgagtgcttgttagagagaaagagaactactaaggaaaataatattatttaaactcgctcctagtgtttctttgtggtctgtgtcaccgtatctcaggaagtccagccacttgactggcacacacccctccggacatccagcgtgacggagcccacactgccaccttgtggccgcctgagaccctcgcgccccccgcgccccccgcgcccctctttttccccttgatggaaattgaccatacaatttcatcctccttcaggggatcaaaaggacggagtggggggacagagactcagatgaggacagagtggtttccaatgtgttcaatagatttaggagcagaaatgcaaggggctgcatgacctaccaggacagaactttccccaattacagggtgactcacagccgcattggtgactcacttcaatgtgtcatttccggctgctgtgtgtgagcagtggacacgtgaggggggggtgggtgagagagacaggcagctcggattcaactaccttagataatatttctgaaaacctaccagccagagggtagggcacaaagatggatgtaatgcactttgggaggccaaggcgggaggattgcttgagcccaggagttcaagaccagcctgggcaacataccaagacccccgtctctttaaaaatatatatattttaaatatacttaaatatatatttctaatatctttaaatatatatatatattttaaagaccaatttatgggagaattgcacacagatgtgaaatgaatgtaatctaatagaagc

SEQ ID NO: 1188 - DNA, 1884 bp; single-stranded, linear
  immediate source library: GENBANK
  immediate source clone: g189544
gttacccgtcagacagcaactcagagaataaccagagaacaaccagattgaaacaatggaggatctttgtgtggcaaacacactctttgccctcaatttattcaagcatctggcaaaagcaagccccacccagaacctcttcctctccccatggagcatctcgtccaccatggccatggtctacatgggctccaggggcagcaccgaagaccagatggccaaggtgcttcagtttaatgaagtgggagccaatgcagttacccccatgactccagagaactttaccagctgtgggttcatgcagcagatccagaagggtagttatcctgatgcgattttgcaggcacaagctgcagataaaatccattcatccttccgctctctcagctctgcaatcaatgcatccacaggggattatttactggaaagtgtcaataagctgtttggtgagaagtctgcgagcttccgggaagaatatattcgactctgtcagaaatattactcctcagaaccccaggcagtagacttcctagaatgtgcagaagaagctagaaaaaagattaattcctgggtcaagactcaaaccaaaggcaaaatcccaaacttgttacctgaaggttctgtagatggggataccaggatggtcctggtgaatgctgtctacttcaaaggaaagtggaaaactccatttgagaagaaactaaatgggctttatcctttccgtgtaaactcggctcagcgcacacctgtacagatgatgtacttgcgtgaaaagctaaacattggatacatagaagacctaaaggctcagattctagaactcccatatgctggagatgttagcatgttcttgttgcttccagatgaaattgccgatgtgtccactggcttggagctgctggaaagtgaaataacctatgacaaactcaacaagtggaccagcaaagacaaaatggctgaagatgaagttgaggtatacataccccagttcaaattagaagagcattatgaactcagatccattctgagaagcatgggcatggaggacgccttcaacaagggacgggccaatttctcagggatgtcggagaggaatgacctgtttctttctgaagtgttccaccaagccatggtggatgtgaatgaggagggcactgaagcagccgctggcacaggaggtgttatgacagggagaactggacatggaggcccacagtttgtggcagatcatccgtttctttttcttattatgcataagataaccaagtgcattttatttttcggcagattttgctcaccctaaaactaagcgtgctgcttctgcaaaagatttttgtagatgagctgtgtgcctcagaattgctatttcaaattgccaaaaatttagagatgttttctacatatttctgctcttctgaacaacttctgctacccactaaataaaaacacagaaataattagacaattgtctattataacatgacaaccctattaatcatttggtcttctaaaatgggatcatgcccatttagattttccttactatcagtttatttttataacattaacttttactttgttatttattattttatataatggtgagtttttaaattattgctcactgcctatttaatgtagctaataaagttatagaagcagatgatctgttaatttcctatctaataaatgcctttaattgttctcataatgaagaataagtaggtatccctccatgcccttctataataaatatctggaaaaaacattaaacaataggcaaatatatgttatgtgcatttctagaaatacataacacatatatatgtctgtatcttatattcaattgcaagtatataataaataaacctgcttccaaacaac

SEQ ID NO: 1189 - DNA, 1854 bp; single-stranded, linear
  immediate source library: GENBANK
  immediate source clone: g189546
gtcagacagcaactcagagaataaccagagaacaaccagattgaaacaatggaggatctttgtgtggcaaacacactctttgccctcaatttattcaagcatctggcaaaagcaagccccacccagaacctcttcctctccccatggagcatctcgtccaccatggccatggtctacatgggctccaggggcagcaccgaagaccagatggccaaggtgcttcagtttaatgaagtgggagccaatgcagttacccccatgactccagagaactttaccagctgtgggttcatgcagcagatccagaagggtagttatcctgatgcgattttgcaggcacaagctgcagataaaatccattcatccttccgctctctcagctctgcaatcaatgcatccacagggaattatttactggaaagtgtcaataagctgtttggtgagaagtctgcgagcttccgggaagaatatattcgactctgtcagaaatattactcctcagaaccccaggcagtagacttcctagaatgtgcagaagaagctagaaaaaagattaattcctgggtcaagactcaaaccaaaggcaaaatcccaaacttgttacctgaaggttctgtagatggggataccaggatggtcctggtgaatgctgtctacttcaaaggaaagtggaaaactccatttgagaagaaactaaatgggctttatcctttccgtgtaaactcggctcagcgcacacctgtacagatgatgtacttgcgtgaaaagctaaacattggatacatagaagacctaaaggctcagattctagaactcccatatgctggagatgttagcatgttcttgttgcttccagatgaaattgccgatgtgtccactggcttggagctgctggaaagtgaaataacctatgacaaactcaacaagtggaccagcaaagacaaaatggctgaagatgaagttgaggtatacataccccagttcaaattagaagagcattatgaactcagatccattctgagaagcatgggcatggaggacgccttcaacaagggacgggccaatttctcagggatgtcggagaggaatgacctgtttctttctgaagtgttccaccaagccatggtggatgtgaatgaggagggcactgaagcagccgctggcacaggaggtgttatgacagggagaactggacatggaggcccacagtttgtggcagatcatccttttctttttcttattatgcataagataaccaactgcattttatttttcggcagattttcctcaccctaaaactaagcgtgctgcttctgcaaaagatttttgtagatgagctgtgtgcctcagaattgctatttcaaattgccaaaaatttagagatgttttctacatatttctgctcttctgaacaacttctgctacccactaaataaaaacacagaaataattagacaattgtctattataacatgacaaccctattaatcatttggtcttctaaaatgggatcatgcccatttagattttccttactatcagtttatttttataacattaacttttactttgttatttattattttatataatggtgagtttttaaattattgctcactgcctatttaatgtagctaataaagttatagaagcagatgatctgttaatttcctatctaataaatgcctttaattgttctcataatgaagaataagtaggtatccctccatgcccttctgtaataaatatctggaaaaaacattaaacaataggcaaatatatgttatgtgcatttctagaaatacataacacatatatatgtctgtatcttatattcaattgcaagtatataat

SEQ ID NO: 1190 - DNA, 1301 bp; single-stranded, linear
  immediate source library: GENBANK
  immediate source clone: g189616
cgcagaggaggagcgcagccggcctcgaagaacttctgcttgggtggctgaactctgatcttgacctagagtcatggccatggcaaccaaaggaggtactgtcaaagctgcttcaggattcaatgccatggaagatgcccagaccctgaggaaggccatgaaagggctcggcaccgatgaagacgccattattagcgtccttgcctaccgcaacaccgcccagcgccaggagatcaggacagcctacaagagcaccatcggcagggacttgatagacgacctgaagtcagaactgagtggcaacttcgagcaggtgattgtggggatgatgacgcccacggtgctgtatgacgtgcaagagctgcaaagggccatgaagggagccggcactgatgagggctgcctaattgagatcctggcctcccggacccctgaggagatccggcgcataagccaaacctaccagcagcaatatggacggagccttgaagatgacattcgctctgacacatcgttcatgttccagcgagtgctggtgtctctgtcagctggtgggagggatgaaggaaattatctggacgatgctctcgtgagacaggatgcccaggacctgtatgaggctggagagaagaaatgggggacagatgaggtgaaatttctaactgttctctgttcccggaaccgaaatcacctgttgcatgtgtttgatgaatacaaaaggatatcacagaaggatattgaacagagtattaaatctgaaacatctggtagctttgaagatgctctgctggctatagtaaagtgcatgaggaacaaatctgcatattttgctgaaaagctctataaatcgatgaagggcttgggcaccgatgataacaccctcatcagagtgatggtttctcgagcagaaattgacatgttggatatccgggcacacttcaagagactctatggaaagtctctgtactcgttcatcaagggtgacacatctggagactacaggaaagtactgcttgttctctgtggaggagatgattaaaataaaaatcccagaaggacaggaggattctcaacactttgaatttttttaacttcatttttctacactgctattatcattatctcagaatgcttatttccaattaaaacgcctacagctgcctcctagaatatagactgtctgtattattattcacctataattagtcattatgatgctttaaagctgtacttgcatttcaaagcttataagatataaatggagattttaaagtagaaataaatatgtattccatgttttt

SEQ ID NO: 1191 - DNA, 2104 bp; single-stranded, linear
  immediate source library: GENBANK
  immediate source clone: g189679
tgccgccgcgacccttggcgcctgcccctgcaacgggagccccactgcaggccccaccatggcgccgttcctgcgcatcgccttcaactcctatgagctgggctccctgcaggccgaggacgaggcgaaccagcccttctgtgccgtgaagatgaaggaggcgctcagcacagagcgtgggaaaacactggtgcagaagaagccgaccatgtatcctgagtggaagtcgacgttcgatgcccacatctatgaggggcgcgtcatccagattgtgctaatgcgggcagcagaggagccagtgtctgaggtgaccgtgggtgtgtcggtgctggccgagcgctgcaagaagaacaatggcaaggctgagttctggctggacctgcagcctcaggccaaggtgttgatgtctgttcagtatttcctggaggacgtggattgcaaacaatctatgcgcagtgaggacgaggccaagttcccaacgatgaaccgccgcggagccatcaaacaggccaaaatccactacatcaagaaccatgagtttatcgccaccttctttgggcaacccaccttctgttctgtgtgcaaagactttgtctggggcctcaacaagcaaggctacaaatgcaggcaatgtaacgctgccatccacaagaaatgcatcgacaagatcatcggcagatgcactggcaccgcggccaacagccgggacactatattccagaaagaacgcttcaacatcgacatgccgcaccgcttcaaggttcacaactacatgagccccaccttctgtgaccactgcggcagcctgctctggggactggtgaagcagggattaaagtgtgaagactgcggcatgaatgtgcaccataaatgccgggagaaggtggccaacctctgcggcatcaaccagaagcttttggctgaggccttgaaccaagtcacccagagagcctcccggagatcagactcagcctcctcagagcctgttgggatatatcagggtttcgagaagaagaccggagttgctggggaggacatgcaagacaacagtgggacctacggcaagatctgggagggcagcagcaagtgcaacatcaacaacttcatcttccacaaggtcctgggcaaaggcagcttcgggaaggtgctgcttggagagctgaagggcagaggagagtactctgccatcaaggccctcaagaaggatgtggtcctgatcgacgacgacgtggagtgcaccatggttgagaagcgggtgctgacacttgccgcagagaatccctttctcacccacctcatctgcaccttccagaccaaggaccacctgttctttgtgatggagttcctcaacgggggggacctgatgtaccacatccaggacaaaggccgctttgaactctaccgtgccacgttttatgccgctgagataatgtgtggactgcagtttctacacagcaagggcatcatttacagggacctcaaactggacaatgtgctgttggaccgggatggccacatcaagattgccgactttgggatgtgcaaagagaacatattcggggagagccgggccagcaccttctgcggcacccctgactatatcgcccctgagatcctacagggcctgaagtacacattctctgtggactggtggtctttcggggtccttctgtacgagatgctcattggccagtcccccttccatggtgatgatgaggatgaactcttcgagtccatccgtgtggacacgccacattatccccgctggatcaccaaggagtccaaggacatcctggagaagctctttgaaagggaaccaaccaagaggctgggaatgacgggaaacatcaaaatccaccccttcttcaagaccataaactggactctgctggaaaagcggaggttggagccacccttcaggcccaaagtgaagtcacccagagactacagtaactttgaccaggagttcctgaacgagaaggcgcgcctctcctacagcgacaagaacctcatcgactccatggaccagtctgcattcgctggcttctcctttgtgaaccccaaattcgagcacctcctggaagattgaggttcctggacagat

SEQ ID NO: 1192 - DNA, 1587 bp; single-stranded, linear
  immediate source library: GENBANK
  immediate source clone: g189700
gggcgaggggcggacaccggagagacacgggaaaggggtcgggacaggagcacgtggctcagacaccgacgccgggaggccgcagaccccggacgtgtcaggcatccccgcaggcccggagcgatggcagccttgatgaccccgggaaccggggccccacccgcgcctggtgacttctccggggaagggagccagggacttcccgacccttcgccagagcccaagcagctcccggagctgatccgcatgaagcgagacggaggccgcctgagcgaagcggacatcaggggcttcgtggccgctgtggtgaatgggagcgcgcagggcgcacagatcggggccatgctgatggccatccgacttcggggcatggatctggaggagacctcggtgctgacccaggccctggctcagtcgggacagcagctggagtggccagaggcctggcgccagcagcttgtggacaagcattccacagggggtgtgggtgacaaggtcagcctggtcctcgcacctgccctggcggcatgtggctgcaaggtgccaatgatcagcggacgtggtctggggcacacaggaggcaccttggataagctggagtctattcctggattcaatgtcatccagagcccagagcagatgcaagtgctgctggaccaggcgggctgctgtatcgtgggtcagagtgagcagctggttcctgcggacggaatcctatatgcagccagagatgtgacagccaccgtggacagcctgccactcatcacagcctccattctcagtaagaaactcgtggaggggctgtccgctctggtggtggacgttaagttcggaggggccgccgtcttccccaaccaggagcaggcccgggagctggcaaagacgctggttggcgtgggagccagcctagggcttcgggtcgcggcagcgctgaccgccatggacaagcccctgggtcgctgcgtgggccacgccctggaggtggaggaggcgctgctctgcatggacggcgcaggcccgccagacttaagggacctggtcaccacgctcgggggcgccctgctctggctcagcggacacgcggggactcaggctcagggcgctgcccgggtggccgcggcgctggacgacggctcggcccttggccgcttcgagcggatgctggcggcgcagggcgtggatcccggtctggcccgagccctgtgctcgggaagtcccgcagaacgccggcagctgctgcctcgcgcccgggagcaggaggagctgctggcgcccgcagatggcaccgtggagctggtccgggcgctgccgctggcgctggtgctgcacgagctcggggccgggcgcagccgcgctggggagccgctccgcctgggggtgggcgcagagctgctggtcgacgtgggtcagaggctgcgccgtgggaccccctggctccgcgtgcaccgggacggccccgcgctcagcggcccgcagagccgcgccctgcaggaggcgctcgtactctccgaccgcgcgccattcgccgccccctcgcccttcgcagagctcgttctgccgccgcagcaataaagctcctttgccgcg

SEQ ID NO: 1193 - DNA, 5570 bp; single-stranded, linear
  immediate source library: GENBANK
  immediate source clone: g189731
ggcccctcagccctgctgcccagcacgagcctgtgctcgccctgcccaacgcagacagccagacccagggcggcccctctggcggctctgctcctcccgaaggatgcttggggagtgaggcgaagctgggcgctcctctcccctacagcagcccccttcctccatccctctgttctcctgagccttcaggagcctgcaccagtcctgcctgtccttctactcagctgttacccactctgggaccagcagtctttctgataactgggagagggcagtaaggaggacttcctggagggggtgactgtccagagcctggaactgtgcccacaccagaagccatcagcagcaaggacaccatgcggcttccgggtgcgatgccagctctggccctcaaaggcgagctgctgttgctgtctctcctgttacttctggaaccacagatctctcagggcctggtcgtcacacccccggggccagagcttgtcctcaatgtctccagcaccttcgttctgacctgctcgggttcagctccggtggtgtgggaacggatgtcccaggagcccccacaggaaatggccaaggcccaggatggcaccttctccagcgtgctcacactgaccaacctcactgggctagacacgggagaatacttttgcacccacaatgactcccgtggactggagaccgatgagcggaaacggctctacatctttgtgccagatcccaccgtgggcttcctccctaatgatgccgaggaactattcatctttctcacggaaataactgagatcaccattccatgccgagtaacagacccacagctggtggtgacactgcacgagaagaaaggggacgttgcactgcctgtcccctatgatcaccaacgtggcttttctggtatctttgaggacagaagctacatctgcaaaaccaccattggggacagggaggtggattctgatgcctactatgtctacagactccaggtgtcatccatcaacgtctctgtgaacgcagtgcagactgtggtccgccagggtgagaacatcaccctcatgtgcattgtgatcgggaatgaggtggtcaacttcgagtggacatacccccgcaaagaaagtgggcggctggtggagccggtgactgacttcctcttggatatgccttaccacatccgctccatcctgcacatccccagtgccgagttagaagactcggggacctacacctgcaatgtgacggagagtgtgaatgaccatcaggatgaaaaggccatcaacatcaccgtggttgagagcggctacgtgcggctcctgggagaggtgggcacactacaatttgctgagctgcatcggagccggacactgcaggtagtgttcgaggcctacccaccgcccactgtcctgtggttcaaagacaaccgcaccctgggcgactccagcgctggcgaaatcgccctgtccacgcgcaacgtgtcggagacccggtatgtgtcagagctgacactggttcgcgtgaaggtggcagaggctggccactacaccatgcgggccttccatgaggatgctgaggtccagctctccttccagctacagatcaatgtccctgtccgagtgctggagctaagtgagagccaccctgacagtggggaacagacagtccgctgtcgtggccggggcatgccccagccgaacatcatctggtctgcctgcagagacctcaaaaggtgtccacgtgagctgccgcccacgctgctggggaacagttccgaagaggagagccagctggagactaacgtgacgtactgggaggaggagcaggagtttgaggtggtgagcacactgcgtctgcagcacgtggatcggccactgtcggtgcgctgcacgctgcgcaacgctgtgggccaggacacgcaggaggtcatcgtggtgccacactccttgccctttaaggtggtggtgatctcagccatcctggccctggtggtgctcaccatcatctcccttatcatcctcatcatgctttggcagaagaagccacgttacgagatccgatggaaggtgattgagtctgtgagctctgacggccatgagtacatctacgtggaccccatgcagctgccctatgactccacgtgggagctgccgcgggaccagcttgtgctgggacgcaccctcggctctggggcctttgggcaggtggtggaggccacggctcatggcctgagccattctcaggccacgatgaaagtggccgtcaagatgcttaaatccacagcccgcagcagtgagaagcaagcccttatgtcggagctgaagatcatgagtcaccttgggccccacctgaacgtggtcaacctgttgggggcctgcaccaaaggaggacccatctatatcatcactgagtactgccgctacggagacctggtggactacctgcaccgcaacaaacacaccttcctgcagcaccactccgacaagcgccgcccgcccagcgcggagctctacagcaatgctctgcccgttgggctccccctgcccagccatgtgtccttgaccggggagagcgacggtggctacatggacatgagcaaggacgagtcggtggactatgtgcccatgctggacatgaaaggagacgtcaaatatgcagacatcgagtcctccaactacatggccccttacgataactacgttccctctgcccctgagaggacctgccgagcaactttgatcaacgagtctccagtgctaagctacatggacctcgtgggcttcagctaccaggtggccaatggcatggagtttctggcctccaagaactgcgtccacagagacctggcggctaggaacgtgctcatctgtgaaggcaagctggtcaagatctgtgactttggcctggctcgagacatcatgcgggactcgaattacatctccaaaggcagcacctttttgcctttaaagtggatggctccggagagcatcttcaacagcctctacaccaccctgagcgacgtgtggtccttcgggatcctgctctgggagatcttcaccttgggtggcaccccttacccagagctgcccatgaacgagcagttctacaatgccatcaaacggggttaccgcatggcccagcctgcccatgcctccgacgagatctatgagatcatgcagaagtgctgggaagagaagtttgagattcggccccccttctcccagctggtgctgcttctcgagagactgttgggcgaaggttacaaaaagaagtaccagcaggtggatgaggagtttctgaggagtgaccacccagccatccttcggtcccaggcccgcttgcctgggttccatggcctccgatctcccctggacaccagctccgtcctctatactgccgtgcagcccaatgagggtgacaacgactatatcatccccctgcctgaccccaaacccgaggttgctgacgagggcccactggagggttcccccagcctagccagctccaccctgaatgaagtcaacacctcctcaaccatctcctgtgacagccccctggagccccaggacgaaccagagccagagccccagcttgagctccaggtggagccggagccagagctggaacagttgccggattcggggtgccctgcgcctcgggcggaagcagaggatagcttcctgtagggggctggcccctaccctgccctgcctgaagctccccccctgccagcacccagcatctcctggcctggcctgaccgggcttcctgtcagccaggctgcccttatcagctgtccccttctggaagctttctgctcctgacgtgttgtgccccaaaccctggggctggcttaggaggcaagaaaactgcaggggccgtgaccagccctctgcctccagggaggccaactgactctgagccagggttcccccagggaactcagttttcccatatgtaagatgggaaagttaggcttgatgacccagaatctaggattctctccctggctgacaggtggggagaccgaatccctccctgggaagattcttggagttactgaggtggtaaattaacttttttctgttcagccagctacccctcaaggaatcatagctctctcctcgcactttttatccacccaggagctagggaagagaccctagcctccctggctgctggctgagctagggcctagccttgagcagtgttgcctcatccagaagaaagccagtctcctccctatgatgccagtccctgcgttccctggcccgagctggtctggggccattaggcagcctaattaatgctggaggctgagccaagtacaggacacccccagcctgcagcccttgcccagggcacttggagcacacgcagccatagcaagtgcctgtgtccctgtccttcaggcccatcagtcctggggctttttctttatcaccctcagtcttaatccatccaccagagtctagaaggccagacgggccccgcatctgtgatgagaatgtaaatgtgccagtgtggagtggccacgtgtgtgtgccagtatatggccctggctctgcattggacctgctatgaggctttggaggaatccctcaccctctctgggcctcagtttccccttcaaaaaatgaataagtcggacttattaactctgagtgccttgccagcactaacattctagagtattccaggtggttgcacatttgtccagatgaagcaaggccatataccctaaacttccatcctgggggtcagctgggctcctgggagattccagatcacacatcacactctggggactcaggaaccatgccccttccccaggcccccagcaagtctcaagaacacagctgcacaggccttgacttagagtgacagccggtgtcctggaaagccccaagcagctgccccagggacatgggaagaccacgggacctctttcactacccacgatgacctccgggggtatcctgggcaaaagggacaaagagggcaaatgagatcacctcctgcagcccaccactccagcacctgtgccgaggtctgcgtcgaagacagaatggacagtgaggacagttatgtcttgtaaaagacaagaagcttcagatggtaccccaagaaggatgtgagaggtggccgcttggagtttgcccctcacccaccagctgccccatccctgaggcagcgctccatgggggtatggttttgtcactgcccagacctagcagtgacatctcattgtccccagcccagtgggcattggaggtgccaggggagtcagggttgtagccaagacgcccccgcacggggagggttgggaagggggtgcaggaagctcaacccctctgggcaccaaccctgcattgcaggttggcaccttacttccctgggatccccagagttggtccaaggagggagagtgggttctcaatacggtaccaaagatataatcacctaggtttacaaatatttttaggactcacgttaactcacatttatacagcagaaatgctattttgtatgctgttaagtttttctatctgtgtacttttttttaagggaaagatttt

SEQ ID NO: 1194 - DNA, 6378 bp; single-stranded, linear
  immediate source library: GENBANK
  immediate source clone: g189733
cccattactgttggagctacagggagagaaacaggaggagactgcaagagatcatttgggaaggccgtgggcacgctctttactccatgtgtgggacattcattgcggaataacatcggaggagaagtttcccagagctatggggacttcccatccggcgttcctggtcttaggctgtcttctcacagggctgagcctaatcctctgccagctttcattaccctctatccttccaaatgaaaatgaaaaggttgtgcagctgaattcatccttttctctgagatgctttggggagagtgaagtgagctggcagtaccccatgtctgaagaagagagctccgatgtggaaatcagaaatgaagaaaacaacagcggcctttttgtgacggtcttggaagtgagcagtgcctcggcggcccacacagggttgtacacttgctattacaaccacactcagacagaagagaatgagcttgaaggcaggcacatttacatctatgtgccagacccagatgtagcctttgtacctctaggaatgacggattatttagtcatcgtggaggatgatgattctgccattataccttgtcgcacaactgatcccgagactcctgtaaccttacacaacagtgagggggtggtacctgcctcctacgacagcagacagggctttaatgggaccttcactgtagggccctatatctgtgaggccaccgtcaaaggaaagaagttccagaccatcccatttaatgtttatgctttaaaagcaacatcagagctggatctagaaatggaagctcttaaaaccgtgtataagtcaggggaaacgattgtggtcacctgtgctgtttttaacaatgaggtggttgaccttcaatggacttaccctggagaagtgaaaggcaaaggcatcacaatgctggaagaaatcaaagtcccatccatcaaattggtgtacactttgacggtccccgaggccacggtgaaagacagtggagattacgaatgtgctgcccgccaggctaccagggaggtcaaagaaatgaagaaagtcactatttctgtccatgagaaaggtttcattgaaatcaaacccaccttcagccagttggaagctgtcaacctgcatgaagtcaaacattttgttgtagaggtgcgggcctacccacctcccaggatatcctggctgaaaaacaatctgactctgattgaaaatctcactgagatcaccactgatgtggaaaagattcaggaaataaggtatcgaagcaaattaaagctgatccgtgctaaggaagaagacagtggccattatactattgtagctcaaaatgaagatgctgtgaagagctatacttttgaactgttaactcaagttccttcatccattctggacttggtcgatgatcaccatggctcaactgggggacagacggtgaggtgcacagctgaaggcacgccgcttcctgatattgagtggatgatatgcaaagatattaagaaatgtaataatgaaacttcctggactattttggccaacaatgtctcaaacatcatcacggagatccactcccgagacaggagtaccgtggagggccgtgtgactttcgccaaagtggaggagaccatcgccgtgcgatgcctggctaagaatctccttggagctgagaaccgagagctgaagctggtggctcccaccctgcgttctgaactcacggtggctgctgcagtcctggtgctgttggtgattgtgatcatctcacttattgtcctggttgtcatttggaaacagaaaccgaggtatgaaattcgctggagggtcattgaatcaatcagcccggatggacatgaatatatttatgtggacccgatgcagctgccttatgactcaagatgggagtttccaagagatggactagtgcttggtcgggtcttggggtctggagcgtttgggaaggtggttgaaggaacagcctatggattaagccggtcccaacctgtcatgaaagttgcagtgaagatgctaaaacccacggccagatccagtgaaaaacaagctctcatgtctgaactgaagataatgactcacctggggccacatttgaacattgtaaacttgctgggagcctgcaccaagtcaggccccatttacatcatcacagagtattgcttctatggagatttggtcaactatttgcataagaatagggatagcttcctgagccaccacccagagaagccaaagaaagagctggatatctttggattgaaccctgctgatgaaagcacacggagctatgttattttatcttttgaaaacaatggtgactacatggacatgaagcaggctgatactacacagtatgtccccatgctagaaaggaaagaggtttctaaatattccgacatccagagatcactctatgatcgtccagcctcatataagaagaaatctatgttagactcagaagtcaaaaacctcctttcagatgataactcagaaggccttactttattggatttgttgagcttcacctatcaagttgcccgaggaatggagtttttggcttcaaaaaattgtgtccaccgtgatctggctgctcgcaacgtcctcctggcacaaggaaaaattgtgaagatctgtgactttggcctggccagagacatcatgcatgattcgaactatgtgtcgaaaggcagtacctttctgcccgtgaagtggatggctcctgagagcatctttgacaacctctacaccacactgagtgatgtctggtcttatggcattctgctctgggagatcttttcccttggtggcaccccttaccccggcatgatggtggattctactttctacaataagatcaagagtgggtaccggatggccaagcctgaccacgctaccagtgaagtctacgagatcatggtgaaatgctggaacagtgagccggagaagagaccctccttttaccacctgagtgagattgtggagaatctgctgcctggacaatataaaaagagttatgaaaaaattcacctggacttcctgaagagtgaccatcctgctgtggcacgcatgcgtgtggactcagacaatgcatacattggtgtcacctacaaaaacgaggaagacaagctgaaggactgggagggtggtctggatgagcagagactgagcgctgacagtggctacatcattcctctgcctgacattgaccctgtccctgaggaggaggacctgggcaagaggaacagacacagctcgcagacctctgaagagagtgccattgagacgggttccagcagttccaccttcatcaagagagaggacgagaccattgaagacatcgacatgatggacgacatcggcatagactcttcagacctggtggaagacagcttcctgtaactggcggattcgaggggttccttccacttctggggccacctctggatcccgttcagaaaaccactttattgcaatgcggaggttgagaggaggacttggttgatgtttaaagagaagttcccagccaagggcctcggggagcgttctaaatatgaatgaatgggatattttgaaatgaactttgtcagtgttgcctctcgcaatgcctcagtagcatctcagtggtgtgtgaagtttggagatagatggataagggaataataggccacagaaggtgaactttgtgcttcaaggacattggtgagagtccaacagacacaatttatactgcgacagaacttcagcattgtaattatgtaaataactctaaccaaggctgtgtttagattgtattaactatcttctttggacttctgaagagaccactcaatccatccatgtacttccctcttgaaacctgatgtcagctgctgttgaactttttaaagaagtgcatgaaaaaccatttttgaaccttaaaaggtactggtactatagcattttgctatcttttttagtgttaagagataaagaataataattaaccaaccttgtttaatagatttgggtcatttagaagcctgacaactcattttcatattgtaatctatgtttataatactactactgttatcagtaatgctaaatgtgtaataatgtaacatgatttccctccagagaaagcacaatttaaaacaatccttactaagtaggtgatgagtttgacagtttttgacatttatattaaataacatgtttctctataaagtatggtaatagctttagtgaattaaatttagttgagcatagagaacaaagtaaaagtagtgttgtccaggaagtcagaatttttaactgtactgaataggttccccaatccatcgtattaaaaaacaattaactgccctctgaaataatgggattagaaacaaacaaaactcttaagtcctaaaagttctcaatgtagaggcataaacctgtgctgaacataacttctcatgtatattacccaatggaaaatataatgatcagcaaaaagactggatttgcagaagttttttttttttttcttcatgcctgatgaaagctttggcaaccccaatatatgtattttttgaatctatgaacctgaaaagggtcagaaggatgcccagacatcagcctccttctttcaccccttaccccaaagagaaagagtttgaaactcgagaccataaagatattctttagtggaggctggatgtgcattagcctggatcctcagttctcaaatgtgtgtggcagccaggatgactagatcctgggtttccatccttgagattctgaagtatgaagtctgagggaaaccagagtctgtatttttctaaactccctggctgttctgatcggccagttttcggaaacactgacttaggtttcaggaagttgccatgggaaacaaataatttgaactttggaacagggttggaattcaaccacgcaggaagcctactatttaaatccttggcttcaggttagtgacatttaatgccatctagctagcaattgcgaccttaatttaactttccagtcttagctgaggctgagaaagctaaagtttggttttgacaggttttccaaaagtaaagatgctacttcccactgtatgggggagattgaactttccccgtctcccgtcttctgcctcccactccataccccgccaaggaaaggcatgtacaaaaattatgcaattcagtgttccaagtctctgtgtaaccagctcagtgttttggtggaaaaaacattttaagttttactgataatttgaggttagatgggaggatgaattgtcacatctatccacactgtcaaacaggttggtgtgggttcattggcattctttgcaatactgcttaattgctgataccatatgaatgaaacatgggctgtgattactgcaatcactgtgctatcggcagatgatgctttggaagatgcagaagcaataataaagtacttgactacctactggtgtaatctcaatgcaagccccaactttcttatccaactttttcatagtaagtgcgaagactgagccagattggccaattaaaaacgaaaacctgactaggttctgtagagccaattagacttgaaatacgtttgtgtttctagaatcacagctcaagcattctgtttatcgctcactctcccttgtacagccttattttgttggtgctttgcattttgatattgctgtgagccttgcatgacatcatgaggccggatgaaacttctcagtccagcagtttccagtcctaacaaatgctcccacctgaatttgtatatgactgcatttgtgggtgtgtgtgtgttttcagcaaattccagatttgtttccttttggcctcctgcaaagtctccagaagaaaatttgccaatctttcctactttctatttttatgatgacaatcaaagccggcctgagaaacactatttgtgactttttaaacgattagtgatgtccttaaaatgtggtctgccaatctgtacaaaatggtcctatttttgtgaagagggacataagataaaatgatgttatacatcaatatgtatatatgtatttctatatagacttggagaatactgccaaaacatttatgacaagctgtatcactgccttcgtttatatttttttaactgtgataatccccacaggcacattaactgttgcacttttgaatgtccaaaatttatattttagaaataataaaaagaaagatacttacatgttcccaaaacaatggtgtggtgaatgtgtgagaaaaactaacttgatagggtctaccaatacaaaatgtattacgaatgcccctgttcatgtttttgttttaaaacgtgtaaatgaagatctttatatttcaataaatgatatataatttaaagtt

SEQ ID NO: 1195 - DNA, 1668 bp; single-stranded, linear
  immediate source library: GENBANK
  immediate source clone: g189846
atggcagcccgtctgctcctcctgggcatccttctcctgctgctgcccctgcccgtccctgccccgtgccacacagccgcacgctcagagtgcaagcgcagccacaagttcgtgcctggtgcatggctggccggggagggtgtggacgtgaccagcctccgccgctcgggctccttcccagtggacacacaaaggttcctgcggcccgacggcacctgcaccctctgtgaaaatgccctacaggagggcaccctccagcgcctgcctctggcgctcaccaactggcgggcccagggctctggctgccagcgccatgtaaccagggccaaagtcagctccactgaagctgtggcccgggatgcggctcgtagcatccgcaacgactggaaggtcgggctggacgtgactcctaagcccaccagcaatgtgcatgtgtctgtggccggctcacactcacaggcagccaactttgcagcccagaagacccaccaggaccagtacagcttcagcactgacacggtggagtgccgcttctacagtttccatgtggtacacactcccccgctgcaccctgacttcaagagggccctcggggacctgccccaccacttcaacgcctccacccagcccgcctacctcaggcttatctccaactacggcacccacttcatccgggctgtggagctgggtggccgcatatcggccctcactgccctgcgcacctgcgagctggccctggaagggctcacggacaacgaggtggaggactgcctgactgtcgaggcccaggtcaacataggcatccacggcagcatctctgccgaagccaaggcctgtgaggagaagaagaagaagcacaagatgacggcctccttccaccaaacctaccgggagcgccattcggaagtggttggcggccatcacacctccattaacgacctgctgttcgggatccaggccgggcccgagcagtactcagcctgggtaaactcgctgcccggcagccctggcctggtggactacaccctggaacccctgcacgtgctgctggacagccaggacccgcggcgggaggcactgaggagggccctgagtcagtacctgacggacagggctcgctggagggactgcagccggccgtgcccaccagggcggcagaagagcccccgagacccatgccagtgtgtgtgccatggctcagcggtcaccacccaggactgctgccctcggcagaggggcctggcccagctggaggtgaccttcatccaagcatggggcctgtggggggactggttcactgccacggatgcctatgtgaagctcttctttggtggccaggagctgaggacgagcaccgtgtgggacaataacaaccccatctggtcagtgcggctggattttggggatgtgctcctggccacaggggggcccctgaggttgcaggtctgggatcaggactctggcagggacgatgacctccttggcacctgtgatcaggctcccaagtctggttcccatgaggtgagatgcaacctgaatcatggccacctaaaattccgctatcatgccaggtgcttgccccacctgggaggaggcacctgcctggactatgtcccccaaatgcttctgggggagcctccaggaaaccggagtggggccgtgtggtga

SEQ ID NO: 1196 - DNA, 1571 bp; single-stranded, linear
  immediate source library: GENBANK
  immediate source clone: g189940
aaggtgagcgactgcaggcaaacccggcgacagcgcagctcgcgtcgaccctggctcctctgcctgccccctcaggcccccgcctccttcaggatgacgctggacgtggggccggaggatgagctgcccgactgggccgccgccaaagagttttaccagaagtacgaccctaaggacgtcatcggcagaggagtgagctctgtggtccgccgttgtgttcatcgagctactggccacgagtttgcggtgaagattatggaagtgacagctgagcggctgagtcctgagcagctggaggaggtgcgggaagccacacggcgagagacacacatccttcgccaggtcgccggccacccccacatcatcaccctcatcgattcctacgagtcttctagcttcatgttcctggtgtttgacctgatgcggaagggagagctgtttgactatctcacagagaaggtggccctctctgaaaaggaaaccaggtccatcatgcggtctctgctggaagcagtgagctttctccatgccaacaacattgtgcatcgagatctgaagcccgagaatattctcctagatgacaatatgcagatccgactttcagatttcgggttctcctgccacttggaacctggcgagaagcttcgagagttgtgtgggaccccagggtatctagcgccagagatccttaaatgctccatggatgaaacccacccaggctatggcaaggaggtcgacctctgggcctgtggggtgatcttgttcacactcctggctggctcgccacccttctggcaccggcggcagatcctgatgttacgcatgatcatggagggccagtaccagttcagttcccccgagtgggatgaccgttccagcactgtcaaagacctgatctccaggctgctgcaggtggatcctgaggcacgcctgacagctgagcaggccctacagcaccccttctttgagcgttgtgaaggcagccaaccctggaacctcaccccccgccagcggttccgggtggcagtgtggacagtgctggctgctggacgagtggccctaagcacccatcgtgtacggccactgaccaagaatgcactgttgagggacccttatgcgctgcggtcagtgcggcacctcatcgacaactgtgccttccggctctacgggcactgggtaaagaaaggggagcagcagaaccgggcggctctctttcagcaccggccccctgggccttttcccatcatgggccctgaagaggagggagactctgctgctataactgaggatgaggccgtgcttgtgctgggctaggacctcaaccccagggattcccaggaagcagaactctccagaagaagggttttgatcattccagctcctctgggctctggcctcaggcccactaatgatcctgctaccctcttgaagaccagcccggtacctctctccccactggccaggactctgagatcagagctggggtggaagggagccattctgaacgccacgcctggcccggtcagtgctgcatgcactgcatatgaaataaaatctgctacacgccaggg

SEQ ID NO: 1197 - DNA, 1433 bp; single-stranded, linear
  immediate source library: GENBANK
  immediate source clone: g189946
ttggacagcccgggcaacctcgacaccctgcaggcgaaaaagaacttctccgtcagtcacctgctagacctggaggaagccggggacatggtggcggcacaggcggatgagaacgtgggcgaggctggccggagcctgctggagtcgccgggactcaccagcggcagcgacaccccgcagcaggacaatgaccagctgaactcagaagaaaaaaagaagagaaagcagcgaaggaataggacaaccttcaatagcagccagctgcaggctttggagcgtgtctttgagcggacacactatcctgatgcttttgtgcgagaagaccttgcccgccgggtgaacctcaccgaggcgagagtgcaggtgtggtttcagaaccgaagagccaagttccgcaggaatgagagagccatgctagccaataaaaacgcttccctcctcaaatcctactcaggagacgtgactgctgtggagcagcccatcgtacctcgtcctgctccgagacccaccgattatctctcctgggggacagcgtctccgtacagatcctcgtccctcccaagatgttgtttacacgaggggcttcataacggattctaacggaagacactgaaaagcgccatggctacttattctgccacatgtgccaacaatagccctgcacagggcatcaacatggccaacagcattgccaacctgagactgaaggccaaggaatatagtttacagaggaaccaggtgccaacagtcaactgaggaaaaaaaataattaaacaggcctaagaagaaatcaaaaaccataagacacctatcctgctctgttatttcttcatctgctggggggaaaaagtaaattacaaacaaacaaacaaagcagaactaaaatattgggaccatggcagagaaaagcaggagaggagcaaaatgaaaattagttaacaaatgttcctcctcctctgggataccaccaccacttgtttctgtgtgtgtttattttgtttttctttcattcatgctttgcttaatgtactccaggcttcttcagctaggttcagcccacccacccccatgcttgtaatcccagtgctttgggaggccaaggcaggtggatcacctgaggtcaggagttcgagactagcctgttccactgacatttcttagacattcagcaaaacccccaccttaacctcttttctttcttgagggttggtcctgtccccacctccaccctcccaccccctggaagaggaagggcccgggcatcagtggctagtccaaataaaatatgggcttggggatggaatgggtggtggtaagttcacagagtgtagttagatcccaactcccatgacctctggcttcagtggtgggtggggcagggcagatgaaagggcttcagtgggaacctctgagagcattttcctgttcccaat

SEQ ID NO: 1198 - DNA, 2431 bp; single-stranded, linear
  immediate source library: GENBANK
  immediate source clone: g189995
tgcctctgacaacccaacagtgtggagcagacccacagagagggagacccagagaggtgtgcagtggcatggaagggccagcggggtatctgcggcgggccagtgtggcccaactgacccaggagctgggcactgccttcttccagcagcagcagctgccagctgctatggcagacaccttcctggaacacctctgcctactggacattgactccgagcccgtggctgctcgcagtaccagcatcattgccaccatcgggccagcatctcgctccgtggagcgcctcaaggagatgatcaaggccgggatgaacattgcgcgactcaacttctcccacggctcccacgagtaccatgctgagaccatagccaacgtccgggaggcggtggagagctttgcaggttccccactcagctaccggcccgtggccatcgccctggacaccaagggaccggagatccgcactgggatcctgcaggggggtccagagtcggaagtggagctggtgaagggctcccaggtgctggtgactgtggaccccgcgttccggacgcgggggaacgcgaacaccgtgtgggtggactaccccaatattgtccgggtcgtgccggtggggggccgcatctacattgacgacgggctcatctccctagtggtccagaaaatcagcccagagggactggtgacccaagtggagaacggcggcgtcctgggcagccggaagggcgtgaacttgccaggggcccaggtggacttgcccgggctgtccgagcaggacgtccgagacctgcgcttcggggtggagcatggggtggacatcgtctttgcctcctttgtgcggaaagccagcgacgtggctgccgtcagggctgctctgggtccggaaggacacggcatcaagatcatcagcaaaattgagaaccacgaaggcgtgaagaggtttgatgaaatcctggaggtgagcgacggcatcatggtggcacggggggacctaggcatcgagatcccagcagagaaggttttcctggctcagaagatgatgattgggcgctgcaacttggcgggcaagcctgttgtctgtgccacacagatgctggagagcatgattaccaagccccggccaacgagggcagagacaagcgatgtcgccaatgctgtgctggatggggctgactgcatcatgctgtcaggggagactgccaagggcaacttccctgtggaagcggtgaagatgcagcatcggattgcccgggaggcagaggccgcagtgtaccaccggcagctgtttgaggagctacgtcgggcagcgccactaagccgtgatcccactgaggtcaccgccattggtgctgtggaggctgccttcaagtgctgtgctgctgccatcattgtgctgaccacaactggccgctcagcccagcttctgtctcggtaccgacctcgggcagcagtcattgctgtcacccgctctgcccaggctgcccgccaggtccacttatgccgaggagtcttccccttgctttaccgtgaacctccagaagccatctgggcagatgatgtagatcgccgggtgcaatttggcattgaaagtggaaagctccgtggcttcctccgtgttggagacctggtgattgtggtgacaggctggcgacctggctccggctacaccaacatcatgagggtgctaagcatatcctgagacgcccctcccccctctggcccagcctacccttgtaccccatcccttcctccccagtctacgttctccagcccacacccctccaaagccccacctttaagtcctctcttctctattcctgaccctccctacctgaggcctatctgagactataactgtcatctagccccttcgaggttgccccttccccatctccatttcacacaggtcctgaaagtctgtgtccaattatgcactggccacccaacagcaccaattgtacattctctgcatccaatctgctcagcaggccctaagatgccttgagtctttaatcccaggtttggctggttaattccataaccccaggcatcccatcccttggggtgggggagaggggagacagggcaatcttgtccacagtctcccattctcatatgtagccctcatgataatctgggcatctcgtgccagggcaggctaccccttcatggtgactaacagttacatgaaagtccacgcttttgggaaaactgggtgggatggatgctggggagaagtgagggctgggcagctgattttgtcactgtcttcacaactcgtgctgggcttgtagaccactgtcctggctgctctcatgcctgcctgataccctgcttggtcaaatcccggctgcttccttctgcacccagaaattccttcccactcatgttgttcccacacacaaaccaagagccaaaaatgagtgtgtc

SEQ ID NO: 1199 - DNA, 2875 bp; single-stranded, linear
  immediate source library: GENBANK
  immediate source clone: g190003
gaattctccggagctgaaaaaggatcctgactgaaagctagaggcattgaggagcctgaagattctcaggttttaaagacgctagagtgccaaagaagactttgaagtgtgaaaacatttcctgtaattgaaaccaaaatgtcatttatagatccttaccagcacattatagtggagcaccagtattcccacaagtttacggtagtggtgttacgtgccaccaaagtgacaaagggggcctttggtgacatgcttgatactccagatccctatgtggaactttttatctctacaacccctgacagcaggaagagaacaagacatttcaataatgacataaaccctgtgtggaatgagacctttgaatttattttggatcctaatcaggaaaatgttttggagattacgttaatggatgccaattatgtcatggatgaaactctagggacagcaacatttactgtatcttctatgaaggtgggagaaaagaaagaagttccttttattttcaaccaagtcactgaaatggttctagaaatgtctcttgaagtttgctcatgcccagacctacgatttagtatggctctgtgtgatcaggagaagactttcagacaacagagaaaagaacacataagggagagcatgaagaaactcttgggtccaaagaatagtgaaggattgcattctgcacgtgatgtgcctgtggtagccatattgggttcaggtgggggtttccgagccatggtgggattctctggtgtgatgaaggcattatacgaatcaggaattctggattgtgctacctacgttgctggtctttctggctccacctggtatatgtcaaccttgtattctcaccctgattttccagagaaagggccagaggagattaatgaagaactaatgaaaaatgttagccacaatccccttttacttctcacaccacagaaagttaaaagatatgttgagtctttatggaagaagaaaagctctggacaacctgtcacctttactgacatctttgggatgttaataggagaaacactaattcataatagaatgaatactactctgagcagtttgaaggaaaaagttaatactgcacaatgccctttacctcttttcacctgtcttcatgtcaaacctgacgtttcagagctgatgtttgcagattgggttgaatttagtccatacgaaattggcatggctaaatatggtacttttatggctcccgacttatttggaagcaaattttttatgggaacagtcgttaagaagtatgaagaaaaccccttgcatttcttaatgggtgtctggggcagtgccttttccatattgttcaacagagttttgggcgtttctggttcacaaagcagaggctccacaatggaggaagaattagaaaatattaccacaaagcatattgtgagtaatgatagctcggacagtgatgatgaatcacacgaacccaaaggcactgaaaatgaagatgctggaagtgactatcaaagtgataatcaagcaagttggattcatcgtatgataatggccttggtgagtgattcagctttattcaataccagagaaggacgtgctgggaaggtacacaacttcatgctgggcttgaatctcaatacatcttatccactgtctcctttgagtgactttgccacacaggactcctttgatgatgatgaactggatgcagctgtagcagatcctgatgaatttgagcgaatatatgagcctctggatgtcaaaagtaaaaagattcatgtagtggacagtgggctcacatttaacctgccgtatcccttgatactgagacctcagagaggggttgatctcataatctcctttgacttttctgcaaggccaagtgactctagtcctccgttcaaggaacttctacttgcagaaaagtgggctaaaatgaacaagctcccctttccaaagattgatccttatgtgtttgatcgggaagggctgaaggagtgctatgtctttaaacccaagaatcctgatatggagaaagattgcccaaccatcatccactttgttctggccaacatcaacttcagaaagtacaaggctccaggtgttccaagggaaactgaggaagagaaagaaatcgctgactttgatatttttgatgacccagaatcaccattttcaaccttcaattttcaatatccaaatcaagcattcaaaagactacatgatcttatgcacttcaatactctgaacaacattgatgtgataaaagaagccatggttgaaagcattgaatatagaagacagaatccatctcgttgctctgtttcccttagtaatgttgaggcaagaagatttttcaacaaggagtttctaagtaaacccaaagcatagttcatgtactggaaatggcagcagtttctgatgctgaggcagtttgcaatcccatgacaactggatttaaaagtacagtacagatagtcgtactgatcatgagagactggctgatactcaaagttgcagttacttagctgcatgagaataatactattataagttaggtgacaaatgatgttgattatgtaaggatatacttagctacattttcagtcagtatgaacttcctgatacaaatgtagggatatatactgtatttttaaacatttctcaccaactttcttatgtgtgttctttttaaaaattttttttcttttaaaatatttaacagttcaatctcaataagacctcgcattatgtatgaatgttattcactgactagatttattcataccatgagacaacactatttttatttatatatgcatatatatacatacatgaaataaatacatcaatataaaaataaaaaaaaacggaattc

SEQ ID NO: 1200 - DNA, 562 bp; single-stranded, linear
  immediate source library: GENBANK
  immediate source clone: g190012
tggtcatctcagtttcttttctcaccttgactgcaagatgaaactccttgtgctagctgtgctgctcacagtggccgccgccgacagcggcatcagccctcgggccgtgtggcagttccgcaaaatgatcaagtgcgtgatcccggggagtgaccccttcttggaatacaacaactacggctgctactgtggcttggggggctcaggcacccccgtggatgaactggacaagtgctgccagacacatgacaactgctatgaccaggccaagaagctggacagctgtaaatttctgctggacaacccgtacacccacacctattcatactcgtgctctggctcggcaatcacctgtagcagcaaaaacaaagagtgtgaggccttcatttgcaactgcgaccgcaacgctgccatctgcttttcaaaagctccatataacaaggcacacaagaacctggacaccaagaagtattgtcagagttgaatatcacctctcaaaagcatcacctctatctgcctcatctcacactgtactctccaataaagcaccttgttgaaagaa

SEQ ID NO: 1201 - DNA, 4242 bp; single-stranded, linear
  immediate source library: GENBANK
  immediate source clone: g190035
gaattcggcgctgagtgacccgagtcgggacgcgggctgcgcgcgcgggaccccggagcccaaacccggggcaggcgggcagctgtgcccgggcggcacggccagcttcctgatttctcccgattccttccttctccctggagcggccgacaatgtccaccacggtcaatgtagattcccttgcggaatatgagaagagccagatcaagagagccctggagctggggacggtgatgactgtgttcagcttccgcaagtccacccccgagcggagaaccgtccaggtgatcatggagacgcggcaggtggcctggagcaagaccgccgacaagatcgagggcttcttggatatcatggaaataaaagaaatccgcccagggaagaactccaaagatttcgagcgagcaaaagcagttcgccagaaagaagactgctgcttcaccatcctatatggcactcagttcgtcctcagcacgctcagcttggcagctgactctaaagaggatgcagttaactggctctctggcttgaaaatcttacaccaggaagcgatgaatgcgtccacgcccaccattatcgagagttggctgagaaagcagatatattctgtggatcaaaccagaagaaacagcatcagtctccgagagttgaagaccatcttgcccctgatcaactttaaagtgagcagtgccaagttccttaaagataagtttgtggaaataggagcacacaaagatgagctcagctttgaacagttccatctcttctataaaaaacttatgtttgaacagcaaaaatcgattctcgatgaattcaaaaaggattcgtccgtgttcatcctggggaacactgacaggccggatgcctctgctgtttacctgcatgacttccagaggtttctcatacatgaacagcaggagcattgggctcaggatctgaacaaagtccgtgagcggatgacaaagttcattgatgacaccatgcgtgaaactgctgagcctttcttgtttgtggatgagttcctcacgtacctgttttcacgagaaaacagcatctgggatgagaagtatgacgcggtggacatgcaggacatgaacaaccccctgtctcattactggatctcctcgtcacataacacgtaccttacaggtgaccagctgcggagcgagtcgtccccagaagcttacatccgctgcctgcgcatgggctgtcgctgcattgaactggactgctgggacgggcccgatgggaagccggtcatctaccatggctggacgcggactaccaagatcaagtttgatgacgtcgtgcaggccatcaaagaccacgcctttgttacctcgagcttcccagtgatcctgtccatcgaggagcactgcagcgtggagcaacagcgtcacatggccaaggccttcaaggaagtatttggcgacctgctgttgacgaagcccacggaggccagtgctgaccagctgccctcgcccagccagctgcgggagaagatcatcatcaagcataagaagctgggcccccgaggcgatgtggatgtcaacatggaggacaagaaggacgaacacaagcaacagggggagctgtacatgtgggattccattgaccagaaatggactcggcactactgcgccattgctgatgccaagctgtccttcagtgatgacattgaacagactatggaggaggaagtgccccaggatataccccctacagaactacattttggggagaaatggttccacaagaaggtggagaagaggacgagtgccgagaagttgctgcaggaatactgcatggagacggggggcaaggatggcaccttcctggttcgggagagcgagaccttccccaatgactacaccctgtccttctggcggtcaggccgggtccagcactgccggatccgctccaccatggagggcgggaccctgaaatactacttgactgacaacctgaggttcaggaggatgtatgccctcatccagcactaccgcgagacgcacctgccgtgcgccgagttcgagctgcggctcacggaccctgtgcccaaccccaacccccacgagtccaagccgtggtactatgacagcctgagccgcggagaggcagaggacatgctgatgaggattccccgggacggggccttcctgatccggaagcgagaggggagcgactcctatgccatcaccttcagggctaggggcaaggtaaagcattgtcgcatcaaccgggacggccggcactttgtgctggggacctccgcctattttgagagtctggtggagctcgtcagttactacgagaagcattcactctaccgaaagatgagactgcgctaccccgtgacccccgagctcctggagcgctacaatacggaaagagatataaactccctctacgacgtcagcagaatgtatgtggatcccagtgaaatcaatccgtccatgcctcagagaaccgtgaaagctctgtatgactacaaagccaagcgaagcgatgagctgagcttctgccgtggtgccctcatccacaatgtctccaaggagcccgggggctggtggaaaggagactatggaaccaggatccagcagtacttcccatccaactacgtcgaggacatctcaactgcagacttcgaggagctagaaaagcagattattgaagacaatcccttagggtctctttgcagaggaatattggacctcaatacctataacgtcgtgaaagcccctcagggaaaaaaccagaagtcctttgtcttcatcctggagcccaaggagcagggcgatcctccggtggagtttgccacagacagggtggaggagctctttgagtggtttcagagcatccgagagatcacgtggaagattgacagcaaggagaacaacatgaagtactgggagaagaaccagtccatcgccatcgagctctctgacctggttgtctactgcaaaccaaccagcaaaaccaaggacaacttagaaaatcctgacttccgagaaatccgctcctttgtggagacgaaggctgacagcatcatcagacagaagcccgtcgacctcctgaagtacaatcaaaagggcctgacccgcgtctacccaaagggacaaagagttgactcttcaaactacgaccccttccgcctctggctgtgcggttctcagatggtggcactcaatttccagacggcagataagtacatgcagatgaatcacgcattgttttctctcaacgggcgcacgggctacgttctgcagcctgagagcatgaggacagagaaatatgacccgatgccacccgagtcccagaggaagatcctgatgacgctgacagtcaaggttctcggtgctcgccatctccccaaacttggacgaagtattgcctgtccctttgtagaagtggagatctgtggagccgagtatggcaacaacaagttcaagacgacggttgtgaatgataatggcctcagccctatctgggctccaacacaggagaaggtgacatttgaaatttatgacccaaacctggcatttctgcgctttgtggtttatgaagaagatatgttcagcgatcccaactttcttgctcatgccacttaccccattaaagcagtcaaatcaggattcaggtccgttcctctgaagaatgggtacagcgaggacatagagctggcttccctcctggttttctgtgagatgcggccagtcctggagagcgaagaggaactttactcctcctgtcgccagctgaggaggcggcaagaagaactgaacaaccagctctttctgtatgacacacaccagaacttgcgcaatgccaaccgggatgccctggttaaagagttcagtgttaatgagaaccactccagctgtaccaggagaaatgcaacaagaggttaagagagaagagagtcagcaacagcaagttttactcatagaagctggggtatgtgtgtaagggtattgtgtgtgtgcgcatgtgtgtttgcatgtaggagaacgtgccctattcacactctgggaagacgctaatctgtgacatcttttcttcaagcctgccatcaaggacatttcttaagacccaactggcatgagttggggtaatttcctattattttcatcttggacaacttctaacttatatctttatagaggattccccaaaatgtgctcctcatttttggcctctcatgttccaaacctcattgaataaaaagcaatgaaaaccttg

SEQ ID NO: 1202 - DNA, 4519 bp; single-stranded, linear
  immediate source library: GENBANK
  immediate source clone: g190039
cagccagggccaccccaggggctataagagcaactagatttctggagcagctcggggatgggtgccatttgagcccagcttggctccccctcctggctggcctccttcctgcccttctgcctgcctgtgtctgctgagattctgcaaagaggaacgttggcaccatgtctctgctcaaccctgtcctgctgccccccaaggtgaaggcctatctgagccaaggggagcgcttcatcaaatgggatgatgaaactacagttgcctctccagttatcctccgtgtggatcctaagggctactacttatactggacgtatcaaagtaaggagatggagtttctggatatcaccagcatccgggatactcgctttgggaagtttgccaagatgcccaagagccagaagctccgggacgtcttcaacatggactttcctgataacagtttcctgctgaagacactcacggtggtgtccggcccggacatggtggacctcaccttccacaacttcgtctcctacaaggagaacgtgggcaaggcctgggctgaggacgtactggccctagtcaaacatccgctgacggccaacgcctcccgcagcaccttcctggacaagatccttgtgaagctcaagatgcagctcaactctgaagggaagattccggtgaagaactttttccagatgtttcctgctgaccgcaagcgggtggaagctgctctcagtgcctgccacctccccaaaggcaaaaatgacgccatcaatcctgaggacttcccagaacctgtctacaagagtttcctcatgagcctctgtcctcggccagaaatagatgagatcttcacttcttaccatgctaaggccaaaccctacatgacgaaggagcacctgaccaaattcatcaaccagaaacagcgggactcccggcttaactccctgctgttcccgccagcacggcctgaccaggtgcagggcctcatcgacaagtatgagcccagtggcatcaatgcacagaggggccagctgtcacctgaaggcatggtctggtttctctgtgggccagagaacagcgtgctggcccaggacaagctgctgctccaccacgacatgacgcagccactcaatcattacttcatcaactcgtcccacaacacctacctgacagccggccagttctcaggcctctcctcggctgagatgtaccgccaggtgctgctctctggctgccgttgcgtggagctagactgctggaaggggaaaccccctgacgaggagcccattatcacccatggcttcaccatgaccacagacatcttcttcaaagaagcaattgaggctattgcagaaagtgcctttaagacctccccctatcccatcatcctgtcgtttgagaaccatgtggactcaccccgccagcaggctaagatggctgagtattgccggacgatctttggggatatgctgctcacagagcccctggaaaagttcccactaaaaccaggtgtccccctgcccagccctgaggatctcaggggcaagatcctcatcaagaacaagaagaaccagttttctggccccacctcctccagtaaggataccggtggggaggctgagggcagcagcccacccagtgcccctgcagtgtgggctggcgaggaagggactgagctggaggaggaggaggtggaagaggaagaggaggaggagtcaggaaacctggatgaagaagagattaagaagatgcagtcggatgagggcacagcgggcctggaagtgacggcttatgaggagatgtccagcctagtcaattacatccagcccaccaagttcgtctcctttgagttctctgcccaaaagaaccgaagttatgtcatctcgtccttcacagagctcaaggcatatgacctgctctccaaggcctcggtgcagtttgtggactacaacaagcgccagatgagccgcatttaccccaagggaacccgcatggactcctccaactacatgccccagatgttctggaatgctggatgccagatggttgccctcaacttccagacgatggacttgcccatgcagcagaacatggcagtatttgagttcaacgggcagagcggctacctcctcaagcatgagttcatgcgccggccggacaagcagttcaaccccttctcagtggaccgcatcgacgtggtggtggccaccaccctttccattacggtgatctctgggcagttcctgtcagaacgcagcgtgcgcacctatgtagaagtggagctgtttggccttcctggggaccccaagaggcgctatcgaactaagctgtcacccagtactaactccatcaatcctgtctggaaggaggagccctttgtctttgagaagatcttgatgcctgagctggcctccctcagagtggctgtgatggaggaaggcaacaagtttcttggacaccgcatcatccccatcaatgccctaaattctgggtaccaccacctgtgcctgcacagtgagagcaacatgcccctcaccatgcctgcgctcttcatcttcctggagatgaaggactacatacctggtgcttgggcagatctcactgtggccctcgccaaccccattaagttcttcagtgcccatgacacgaagtctgtgaagctcaaggaggccatgggaggtctgcctgagaagcccttcccactggcgagtccagttgccagccaggtcaatggggcgttggccccaacgagcaatgggtcaccagcagccagggccggggccagggaagaggctatgaaagaagctgcggagccgcggaccgccagcctggaggagctccgggagctaaagggcgtggtgaagctgcagcggcggcacgagaaggagctgcgagagttggagcggcgcggagcgcggcgctgggaggagctgctgcagcggggcgcggcgcagctggcggagctcgggccaccgggcgtggggggcgtcggggcctgcaagctcggtcccggcaagggctctcgcaagaagaggagcctgccccgcgaggagagcgccggagccgcgccgggcgagggccctgagggcgtggacgggcgcgtgcgggagctgaaagacaggctggagctggagctgctgcggcagggcgaggagcagtacgagtgcgttctgaagcgcaaggagcagcacgtggccgagcaaatctccaaaatgatggagctggccagagagaaacaggcggcagagctgaaggccctgaaggagacgtcggagaacgacaccaaagagatgaagaaaaagctggagacaaagagactggagcggatccagggcatgaccaaagtcaccacagacaagatggcccaggagaggttgaagagagagattaacaactcccacatccaggaagtagtgcaggtgatcaagcagatgacggagaacttggagaggcaccaggagaagctggaggagaagcaggcggcttgcctggaacagatacgggagatggaaaagcagttccagaaggaggcgctggcagagtacgaggccaggatgaagggtctggaggcagaggtgaaggagtcggtgagggcctgcctcaggacctgctttccctccgaggccaaggacaagcctgagagggcctgcgagtgccccccagagctgtgtgagcaggacccactcatagcaaaggcagatgcccaggagagccgcctctgatgcccccatcccactgggacatttagcaaggaggttcagccccttctctgggatgtggttctattcccccaggaaaaaggagccccagccttctgaggctgtgggaacctgtggctgccttggacgctgcagccccctcctcaacggccaggccagagtctgagacaggacccaggcaccctcacggcagggcctctctggggcctagaagtcttctcaagctgacttcctacctccccctccatctctagataagtgtcatatatttgttgagggcaaaagactatggactggaaggcagaaagtgggatcctggccccactctgcctttcctattgagcaaccagctctgggctcagtttcctcacctggagggttggacccactcacctccactctagccccgaaccctcctgccccaggcttccaggccccatcaggcctgccctgagttggccttgtccactccttgaggcagatcctggcactacctcacagctccctggggacggccactccctggctgagggccctcccctcccctctgcctgtccggaacgggaggctgaaatggaaaagctgccttggccctgcttggctgagtcacaaggggcagtgggctcttgggtgctgttccaccctgaccctggctcacccctcttcctaggcctgggggcaggcagttcctaccatgtacccctctcaggctgcctgcctgacaaggtcagcatcatttgctctcctgaatttatgaggtttatttatttttctctttcctactcctattaaagaacctcgtcccagtgaaa

SEQ ID NO: 1203 - DNA, 6218 bp; single-stranded, linear
  immediate source library: GENBANK
  immediate source clone: g190339
gaattccaaagtcctctctttgattttataggtgaggaaactaacgctcagaaagggggttgatatctatcgccgtgaggcatacggtaagtttctggtgaagctgggatcagaacctgtttagactttgcctctcttttcccgcagatactttgcaggacttctatgtccctcaaaccggccttcctgtcatggtcaggaaagaaactcctcacagcctcagcatccaagtcaggccatgggtgacagctggaaagtgatcaggaggctgcagtttctagaagagggtggggacactgcggagagaagatggggccagattccgagaagacagcataagcccctgttcctgtaagagcagggacggaagcagggacataaacgcaagggatgagccccaaagtgtgacccatgagacatgatgtcacatgtggtctggagcctgccccacttcttcccatcatatacacagttatgagaacaagttgtgagaaccacctcctcccttacccagctgcccccaccccagaagccgtgtgattttgccccccagtgccctgtgagtcactccacccatggaaacctcaccccaccctgacctcaagcaaggcagagtgcagaagacatgtcctccggtgctaccagaccactctcaccagcacccacgacctcagcagggctggagccagcgtggaggccactggctgtcctcacaaagcgaggagcaggagcccctgttcgaggaacatgcttggagttcggagcctgggctagggtgggatgtaggttgagcaggaagtggatggcaagattagagcaacatctctcttctcccactcagggaggagggaatggccacaggctctgacactcaagaagggccaggcacagttccaagcacttcacaacaacccctagggtctacatgacctacaatcccaattgttcagtgaagaaactgaggcacagtgaggctgaagaaccctaccagtccacactgctggtgcataaccgagctgcccaagccccggcggtctggcgtgtaggcccatgctctgagccgccgcctctgcttgcctcttacatcccacacatgcgatgctgtgcatcagaagcaaggagatggccctgctggcctgttcatcaacaccagggccgagtctcaaagtcctcagcgccccgccctcctccgcctgtgtgccctgagtccccgagccccagcagctctactcggcagatgagcctctggccctgctgctcgcttcctgagggctgtcagtggggagccggatgagggctgaggacagggtgggtgctcgtgggaggggagagcacaaaggacctgtgaccacagctgggggcggggcaggaagtagaagtgatgtgagtggtggctggtgcaaggagccacagtgggctgcctggggggctgatgccaccattccaggagcctcggtgaagagaggatatccatctgtgtagccgcttctctatacgggattccaggtaaggagagagcagggattgggggcctggggccctgggtggaggggaagaggctgatggagcaggaagtgctgtgacctataagacaagacacctgggtcacagacggtgcccatcactaactcgctgggcagccctgtgtccaccctgggcctcagtttcctcatgtatgaaatgaagaggtagcgtgcagtttctaaggccctgcaagtgctgacattaaagcttctaagaaagctggaaagaggctccctgggacagaataccatgagagtcaggatgagggctgagttcactggattagggttatgactgtgcccgcctcctagctgggatgagcccagggcctttgaagattcccctggcctctttgcctccctggggcgagccacgctgcctgaaattccacccttcaagtcacacctttgggcagggcaggaggctccagctataatgggggctctccatagccctcttgtctcagaacctgtggtacccaagggcaaaggcctttgaagagctcagcttggataaggttaggcttgggtaaggttagagaaaggaggttccagatcataaacaggcccaggcaaggccccagaaacaccttaaaattaggaagaaccttccagacaatcattgtccatagtaggcaataggggggcccctgtcactgccgaaggccacagagcttggcagggagtggcaaagaggggaggggcagcaagaaaggatctgaagagcaaccatcgaggcctctccccacacaaaatccaagggtgtggtcaggtctgcccctttttcttttttttctttctcttttttttttttttttttttttgaggcagagtcttactctatcacccaggcgggagtgcagtggtacgatcttggctcactgcaacctccgcctcctgggttcaagcgattctcctgtctcagcctcccaagtagctgggattacaggcacccgccaccatgcccagctaatttttgtatttttagtaaagagggggtttcaccacgttggccaggctggtctcgaacttctgacctccagtgatccacctgcctctgcctcccacagtgttcggtttacaggtgtgagccaccacacctggccaggtcggcagattttattctagaattcgggctgatgttattccataaagctcagagggagagcgccaaagggaaaatgagaagaataggtgcaatataggacctcatttctcttccaattctgttaagggctcagtgggagggagagaggttagagagagtgacagagacaaagaaacagagtgagagtcagggtgggcaaagggtggcttgttctggggccaaaaatgacacttcttcagaatgaaggcttcctcaggtccccagacccctccctaaacctgctacagctactctgtcccctcttctgtggccacagccccctccccaccacccacagttgtgtcctggggacagagccatccacctagatccccattaggccttagggaaattctaaaaaggggctccccttggctgggcttttcccctctctgggcccatctgtacaatgtgggggctgaaccaggcctataagggacataccagctctgacattcattgaataatgacttaagagatatctcagcccctccccttccatgtgccctgataatctgtggctgtgggggaagggagcagtcatcctccatccctccacccatggcttcccagagcccaagtgccccctgtctctgcagctccatggcagcccgtctgctcctcctgggcatccttctcctgctgctgcccctgcccgtccctgccccgtgccacacagccgcacgctcagagtgcaagcgcagccacaagttcgtgcctggtgcatggctggccggggagggtgtggacgtgaccagcctccgccgctcgggctccttcccagtggacacacaaaggttcctgcggcccgacggcacctgcaccctctgtgaaaatgccctacaggagggcaccctccagcgcctgcctctggcgctcaccaactggcgggcccagggctctggctgccagcgccatgtaaccagggccaaagtcagctccactgaagctgtggcccgggatgcggctcgtagcatccgcaacgactggaaggtcgggctggacgtgactcctaagcccaccagcaatgtgcatgtgtctgtggccggctcacactcacaggcagccaactttgcagcccagaagacccaccaggaccagtacagcttcagcactgacacggtggagtgccgcttctacaggtgagagctggggctaggggtggggggctggaaaaggcgcgggaaactctgggtggtctaagagccctggaaaggcagagttctccaatcaaacttggaggctgcttccaccaggaagaaactgcaatcctggctctcagacttcaggtgattcagccctgtggcctcctctcatccaggaggtcccaaatctgggagtgcccagtgagacatcaagtagagagaaagtgagtgagaccatgcctgagagtcccagcagggtgccatttaggtctagtgagtactgaaccctgcctttcctgggcacagccagccttccacagagtccttcctggatagggacagaggcaggagacctggccgggtcatccttcctcatcgctgtgtgaccttgagcatctcacttctctctgagcttcaatcatccactcaaccaatactcacacctgcctgtggcagggccacactgctgagcgacagcagtcactaccctagcccctgggagtaggaagtatgggacccatattccacgtctgagaaaggcacagtgtttgtaggccagacccaagtcacctggtctgattcatcagacctgggggccacgtttcctccacagagaggccgagcatggcccaagctgtcaggatcccgggcatgtgggacccatccagggggacggatggatgaaggccacatgactagttccaaagttcgacagataccatcagtgcaggatcattgcttttatgttcttttttactttttcttaaaaaaaaaatagagatggggtctcactatgttgcccaggctggtctcaaactcctgggctcaagtgatcctcccgcctcggcctcccaaagtgctggggttacaggcatgaaccactgctcccggccaggatcattgcttttataataagaaaattaaaaggaaagaaaaaaatgttattttgaaaaggaaaagagaaaatacctatacagagcactgaggtccctgaggggtgagagcggaggcattcctgccagccccgtgccactgtgcttgtgctctggagccgggcccctgggttccagtcctagttctgcccacttacatgtgaccttgagcagtcctgaaggagttatttgattgaatgggggaaatactcccctgggcccagctgaggtctctctcttctcgcagtttccatgtggtacacactcccccgctgcaccctgacttcaagagggccctcggggacctgccccaccacttcaacgcctccacccagcccgcctacctcaggcttatctccaactacggcacccacttcatccgggctgtggagctgggtggccgcatatcggccctcactgccctgcgcacctgcgagctggccctggaagggctcacggacaacgaggtggaggactgcctgactgtcgaggcccaggtcaacataggcatccacggcagcatctctgccgaagccaaggcctgtgaggagaagaagaagaagcacaagatgacggcctccttccaccaaacctaccgggagcgccactcggaagtggttggcggccatcacacctccattaacgacctgctgttcgggatccaggccgggcccgagcagtactcagcctgggtaaactcgctgcccggcagccctggcctggtggactacaccctggaacccctgcacgtgctgctggacagccaggacccgcggcgggaggcactgaggagggccctgagtcagtacctgacggacagggctcgctggagggactgcagccggccgtgcccaccagggcggcagaagagcccccgagacccatgccagtgtgtgtgccatggctcagcggtcaccacccaggactgctgccctcggcagaggggcctggcccagctggaggtgaccttcatccaagcatggggcctgtggggggactggttcactgccacggatgcctatgtgaagctcttctttggtggccaggagctgaggacgagcaccgtgtgggacaataacaaccccatctggtcagtgcggctggattttggggatgtgctcctggccacaggggggcccctgaggttgcaggtctgggatcaggactctggcagggacgatgacctccttggcacctgtgatcaggctcccaagtctggttcccatgaggtgagatgcaacctgaatcatggccacctaaaattccgctatcatgccaggtgcttgccccacctgggaggaggcacctgcctggactatgtcccccaaatgcttctgggggagcctccaggaaaccggagtggggccgtgtggtgagaacagtgagcttggaaaggaccagtatgcttggactgaaggggttctcacagtgggagccagggctgtcttcgtattcccattagaccaagctt

SEQ ID NO: 1204 - DNA, 659 bp; single-stranded, linear
  immediate source library: GENBANK
  immediate source clone: g190419
gtgcagctgggagagctagactaagttggtcatgatgcagaagctactcaaatgcagtcggcttgtcctggctcttgccctcatcctggttctggaatcctcagttcaaggttatcctacgcagagagccaggtaccaatgggtgcgctgcaatccagacagtaattctgcaaactgccttgaagaaaaaggaccaatgttcgaactacttccaggtgaatccaacaagatcccccgtctgaggactgacctttttccaaagacgagaatccaggacttgaatcgtatcttcccactttctgaggactactctggatcaggcttcggctccggctccggctctggatcaggatctgggagtggcttcctaacggaaatggaacaggattaccaactagtagacgaaagtgatgctttccatgacaaccttaggtctcttgacaggaatctgccctcagacagccaggacttgggtcaacatggattagaagaggattttatgttataaaagaggattttcccaccttgacaccaggcaatgtagttagcatattttatgtaccatggttatatgattaatcttgggacaaagaattttatagaaatttttaaacatctgaaaaagaagcttaagttttatcatcctttttttttctcat

SEQ ID NO: 1205 - DNA, 3541 bp; single-stranded, linear
  immediate source library: GENBANK
  immediate source clone: g190734
tccagtttgcttcttggagaacactggacagctgaataaatgcagtatctaaatataaaagaggactgcaatgccatggctttctgtgctaaaatgaggagctccaagaagactgaggtgaacctggaggcccctgagccaggggtggaagtgatcttctatctgtcggacagggagcccctccggctgggcagtggagagtacacagcagaggaactgtgcatcagggctgcacaggcatgccgtatctctcctctttgtcacaacctctttgccctgtatgacgagaacaccaagctctggtatgctccaaatcgcaccatcaccgttgatgacaagatgtccctccggctccactaccggatgaggttctatttcaccaattggcatggaaccaacgacaatgagcagtcagtgtggcgtcattctccaaagaagcagaaaaatggctacgagaaaaaaaagattccagatgcaacccctctccttgatgccagctcactggagtatctgtttgctcagggacagtatgatttggtgaaatgcctggctcctattcgagaccccaagaccgagcaggatggacatgatattgagaacgagtgtctagggatggctgtcctggccatctcacactatgccatgatgaagaagatgcagttgccagaactgcccaaggacatcagctacaagcgatatattccagaaacattgaataagtccatcagacagaggaaccttctcaccaggatgcggataaataatgttttcaaggatttcctaaaggaatttaacaacaagaccatttgtgacagcagcgtgtccacgcatgacctgaaggtgaaatacttggctaccttggaaactttgacaaaacattacggtgctgaaatatttgagacttccatgttactgatttcatcagaaaatgagatgaattggtttcattcgaatgacggtggaaacgttctctactacgaagtgatggtgactgggaatcttggaatccagtggaggcataaaccaaatgttgtttctgttgaaaaggaaaaaaataaactgaagcggaaaaaactggaaaataaagacaagaaggatgaggagaaaaacaagatccgggaagagtggaacaatttttcattcttccctgaaatcactcacattgtaataaaggagtctgtggtcagcattaacaagcaggacaacaagaaaatggaactgaagctctcttcccacgaggaggccttgtcctttgtgtccctggtagatggctacttccggctcacagcagatgcccatcattacctctgcaccgacgtggcccccccgttgatcgtccacaacatacagaatggctgtcatggtccaatctgtacagaatacgccatcaataaattgcggcaagaaggaagcgaggaggggatgtacgtgctgaggtggagctgcaccgactttgacaacatcctcatgaccgtcacctgctttgagaagtctgagcaggtgcagggtgcccagaagcagttcaagaactttcagatcgaggtgcagaagggccgctacagtctgcacggttcggaccgcagcttccccagcttgggagacctcatgagccacctcaagaagcagatcctgcgcacggataacatcagcttcatgctaaaacgctgctgccagcccaagccccgagaaatctccaacctgctggtggctactaagaaagcccaggagtggcagcccgtctaccccatgagccagctgagtttcgatcggatcctcaagaaggatctggtgcagggcgagcaccttgggagaggcacgagaacacacatctattctgggaccctgatggattacaaggatgacgaaggaacttctgaagagaagaagataaaagtgatcctcaaagtcttagaccccagccacagggatatttccctggccttcttcgaggcagccagcatgatgagacaggtctcccacaaacacatcgtgtacctctatggcgtctgtgtccgcgacgtggagaatatcatggtggaagagtttgtggaagggggtcctctggatctcttcatgcaccggaaaagtgatgtccttaccacaccatggaaattcaaagttgccaaacagctggccagtgccctgagctacttggaggataaagacctggtccatggaaatgtgtgtactaaaaacctcctcctggcccgtgagggaatcgacagtgagtgtggcccattcatcaagctcagtgaccccggcatccccattacggtgctgtctaggcaagaatgcattgaacgaatcccatggattgctcctgagtgtgttgaggactccaagaacctgagtgtggctgctgacaagtggagctttggaaccacgctctgggaaatctgctacaatggcgagatccccttgaaagacaagacgctgattgagaaagagagattctatgaaagccggtgcaggccagtgacaccatcatgtaaggagctggctgacctcatgacccgctgcatgaactatgaccccaatcagaggcctttcttccgagccatcatgagagacattaataagcttgaagagcagaatccagatattgtttccagaaaaaaaaaccagccaactgaagtggaccccacacattttgagaagcgcttcctaaagaggatccgtgacttgggagagggccactttgggaaggttgagctctgcaggtatgaccccgaagacaatacaggggagcaggtggctgttaaatctctgaagcctgagagtggaggtaaccacatagctgatctgaaaaaggaaatcgagatcttaaggaacctctatcatgagaacattgtgaagtacaaaggaatctgcacagaagacggaggaaatggtattaagctcatcatggaatttctgccttcgggaagccttaaggaatatcttccaaagaataagaacaaaataaacctcaaacagcagctaaaatatgccgttcagatttgtaaggggatggactatttgggttctcggcaatacgttcaccgggacttggcagcaagaaatgtccttgttgagagtgaacaccaagtgaaaattggagacttcggtttaaccaaagcaattgaaaccgataaggagtattacaccgtcaaggatgaccgggacagccctgtgttttggtatgctccagaatgtttaatgcaatctaaattttatattgcctctgacgtctggtcttttggagtcactctgcatgagctgctgacttactgtgattcagattctagtcccatggctttgttcctgaaaatgataggcccaacccatggccagatgacagtcacaagacttgtgaatacgttaaaagaaggaaaacgcctgccgtgcccacctaactgtccagatgaggtttatcagcttatgagaaaatgctgggaattccaaccatccaatcggacaagctttcagaaccttattgaaggatttgaagcacttttaaaataagaagcatgaataacatttaaattccacagattatcaa

SEQ ID NO: 1206 - DNA, 2610 bp; single-stranded, linear
  immediate source library: GENBANK
  immediate source clone: g190827
atcctgggacagggcacagggccatctgtcaccaggggcttagggaaggccgagccagcctgggtcaaagaagtcaaaggggctgcctggaggaggcagcctgtcagctggtgcatcagaggctgtggccaggccagctgggctcggggagcgccagcctgagaggagcgcgtgagcgtcgcgggagcctcgggcaccatgagcgacgtggctattgtgaaggagggttggctgcacaaacgaggggagtacatcaagacctggcggccacgctacttcctcctcaagaatgatggcaccttcattggctacaaggagcggccgcaggatgtggaccaacgtgaggctcccctcaacaacttctctgtggcgcagtgccagctgatgaagacggagcggccccggcccaacaccttcatcatccgctgcctgcagtggaccactgtcatcgaacgcaccttccatgtggagactcctgaggagcgggaggagtggacaaccgccatccagactgtggctgacggcctcaagaagcaggaggaggaggagatggacttccggtcgggctcacccagtgacaactcaggggctgaagagatggaggtgtccctggccaagcccaagcaccgcgtgaccatgaacgagtttgagtacctgaagctgctgggcaagggcactttcggcaaggtgatcctggtgaaggagaaggccacaggccgctactacgccatgaagatcctcaagaaggaagtcatcgtggccaaggacgaggtggcccacacactcaccgagaaccgcgtcctgcagaactccaggcaccccttcctcacagccctgaagtactctttccagacccacgaccgcctctgctttgtcatggagtacgccaacgggggcgagctgttcttccacctgtcccgggaacgtgtgttctccgaggaccgggcccgcttctatggcgctgagattgtgtcagccctggactacctgcactcggagaagaacgtggtgtaccgggacctcaagctggagaacctcatgctggacaaggacgggcacattaagatcacagacttcgggctgtgcaaggaggggatcaaggacggtgccaccatgaagaccttttgcggcacacctgagtacctggcccccgaggtgctggaggacaatgactacggccgtgcagtggactggtgggggctgggcgtggtcatgtacgagatgatgtgcggtcgcctgcccttctacaaccaggaccatgagaagctttttgagctcatcctcatggaggagatccgcttcccgcgcacgcttggtcccgaggccaagtccttgctttcagggctgctcaagaaggaccccaagcagaggcttggcgggggctccgaggacgccaaggagatcatgcagcatcgcttctttgccggtatcgtgtggcagcacgtgtacgagaagaagctcagcccacccttcaagccccaggtcacgtcggagactgacaccaggtattttgatgaggagttcacggcccagatgatcaccatcacaccacctgaccaagatgacagcatggagtgtgtggacagcgagcgcaggccccacttcccccagttctcctactcggccagcagcacggcctgaggcggcggtggactgcgctggacgatagcttggagggatggagaggcggcctcgtgccatgatctgtatttaatggtttttatttctcgggtgcatttgagagaagccacgctgtcctctcgagcccagatggaaagacgtttttgtgctgtgggcagcaccctcccccgcagcggggtagggaagaaaactatcctgcgggttttaatttatttcatccagtttgttctccgggtgtggcctcagccctcagaacaatccgattcacgtagggaaatgttaaggacttctacagctatgcgcaatgtggcattggggggccgggcaggtcctgcccatgtgtcccctcactctgtcagccagccgccctgggctgtctgtcaccagctatctgtcatctctctggggccctgggcctcagttcaacctggtggcaccagatgcaacctcactatggtatgctggccagcaccctctcctgggggtggcaggcacacagcagccccccagcactaaggccgtgtctctgaggacgtcatcggaggctgggcccctgggatgggaccagggatgggggatgggccagggtttacccagtgggacagaggagcaaggtttaaatttgttattgtgtattatgttgttcaaatgcattttgggggtttttaatctttgtgacaggaaagccctcccccttccccttctgtgtcacagttcttggtgactgtcccaccggagcctccccctcagatgatctctccacggtagcacttgaccttttcgacgcttaacctttccgctgtcgccccaggccctccctgactccctgtgggggtggccatccctgggcccctccacgcctcctggccagacgctgccgctgccgctgcaccacggcgtttttttacaacattcaactttagtatttttactattataatataatatggaaccttccctccaaattct

SEQ ID NO: 1207 - DNA, 854 bp; single-stranded, linear
  immediate source library: GENBANK
  immediate source clone: g190888
gaattcccaactctggagtcctctgagagagccaccaaggaggagcaggggagcgacggccggggcagaagttgagaccacccagcagaggagctaggccagtccatctgcatttgtcacccaagaactcttaccatgaagaccctcctactgttggcagtgatcatgatctttggcctactgcaggcccatgggaatttggtgaatttccacagaatgatcaagttgacgacaggaaaggaagccgcactcagttatggcttctacggctgccactgtggcgtgggtggcagaggatcccccaaggatgcaacggatcgctgctgtgtcactcatgactgttgctacaaacgtctggagaaacgtggatgtggcaccaaatttctgagctacaagtttagcaactcggggagcagaatcacctgtgcaaaacaggactcctgcagaagtcaactgtgtgagtgtgataaggctgctgccacctgttttgctagaaacaagacgacctacaataaaaagtaccagtactattccaataaacactgcagagggagcacccctcgttgctgagtcccctcttccctggaaaccttccacccagtgctgaatttccctctctcataccctccctccctaccctaaccaagttccttggccatgcagaaagcatccctcacccatcctagaggccaggcaggagcccttctatacccacccagaatgagacatccagcagatttccagccttctactgctctcctccacctcaactccgtgcttaaccaaagaagctgtactccggggggtctcttctgaataaagcaattagcaaatcaaaaaaaaaaaaggaattc

SEQ ID NO: 1208 - DNA, 179 bp; single-stranded, linear
  immediate source library: GENBANK
  immediate source clone: g190899
gattcctacaggaagcaagtagtaattgatggagaaacctgtctcttggatattctcgacacagcaggtcacgaggagtacagtgcaatgagggaccagtacatgaggactggggagggctttctttgtgtatttgccataaataatactaaatcatttgaagatattcaccattatag

SEQ ID NO: 1209 - DNA, 1149 bp; single-stranded, linear
  immediate source library: GENBANK
  immediate source clone: g219534
gaattccctgactacagcattcctggagcccaggctcttttccacagaggaggaaagagcaggcagcagagaccatggggcccccctcagcctctccccacagagaatgcatcccctggcaggggcttctgctcacagcctcacttctaaacttctggaacccgcccaccactgccaagctcactattgaatccatgccgctcagtgtcgcagaggggaacgaggtgcttctacttgtccacaatctgccccagcatctttttggctacagctggtacaaaggggaaagagtggatggcaacagtctaattgtaggatatgtaataggaactcaacaagctaccccaggggccgcatacagcggtcgagagacaatatacaccaatgcatccctgctgatccagaatgtcacccagaatgacataggattctacaccctacaagtcataaagtcagatcttgtgaatgaagaagcaactggacagttccatgtataccaagaaaatgccccaggccttcctgtgggggccgtcgccggcatcgtgaccggggtcctggtcggagtggcgctggtggccgcactggtgtgtttcctgctccttgccaaaactggaagaaccagcatccagcgtgacctcaaggagcagcagccccaagcccttgcccctggccgtggtccctcccacagctctgccttctcgatgtcccctctctccactgcccaggcccccctacccaaccccaggacagcagcttccatctatgaggaattgctaaaacatgacacaaacatttactgccggatggaccacaaagcagaagtggcttcttagcttccgccaggagctgctcctgtgggttgatggagagtccccaaggcccccagccctggggatggggaaggacatgaagcctgagccagagaaccagctataagtcctgagaagacactggtgtctggggacagggagggatgggggtccctgatgaatatgtggagacctcgacagcctgccctaggccctgggtgggtcaggacaaaggcctctcatcaccgcagaaagcgggggcttgcagggaaagtgaatgggcctgtggcccacctggggtcacttggaaaggatctgaataaaggggacccttcctctc

SEQ ID NO: 1210 - DNA, 1435 bp; single-stranded, linear
  immediate source library: GENBANK
  immediate source clone: g219587
aactttccagaacgctcggtgagaggcggaggagcggtaactaccccggctgcgcacagctcggcgctccttcccgctccctcacacaccggcctcagcccgcaccggcagtagaagatggtgaaagaaacaacttactacgatgttttgggggtcaaacccaatgctactcaggaagaattgaaaaaggcttataggaaactggccttgaagtaccatcctgataagaacccaaatgaaggagagaagtttaaacagatttctcaagcttacgaagttctctctgatgcaaagaaaagggaattatatgacaaaggaggagaacaggcaattaaagagggtggagcaggtggcggttttggctcccccatggacatctttgatatgttttttggaggaggaggaaggatgcagagagaaaggagaggtaaaaatgttgtacatcagctctcagtaaccctagaagacttatataatggtgcaacaagaaaactggctctgcaaaagaatgtgatttgtgacaaatgtgaaggtagaggaggtaagaaaggagcagtagagtgctgtcccaattgccgaggtactggaatgcaaataagaattcatcagataggacctggaatggttcagcaaattcagtctgtgtgcatggagtgccagggccatggggagcggatcagtcctaaagatagatgtaaaagctgcaacggaaggaagatagttcgagagaaaaaaattttagaagttcatattgacaaaggcatgaaagatggccagaagataacattccatggtgaaggagaccaagaaccaggactggagccaggcgatattatcattgtgttagatcagaaggaccatgctgtttttactcgacgaggagaagaccttttcatgtgtatggacatacagctcgttgaagcactgtgtggcttccacaagccaatatctactcttgacaaccgaaccatcgtcatcacctctcatccaggtcagattgtcaagcatggagatatcaagtgtgtactaaatgaaggcatgccaatttatcgtagaccatatgaaaagggtcgcctaatcatcgaatttaaggtaaactttcctgagaatggctttctctctcctgataaactgtctttgctggaaaaactcctacccgagaggaaggaagtggaagagactgatgagatggaccaagtagaactggtggactttgatccaaatcaggaaagacggcgccactacaatggagaagcatatgaggatgatgaacatcatcccagaggtggtgttcagtgtcagacctcttaatgggccagtgaataacactcactgctggcatttaatgtgcagtagtgaatgagtgaaggactgtaatcataatatgctcactacttgctcttgtttttgttttaataaactatagtagtgtttt

SEQ ID NO: 1211 - DNA, 1603 bp; single-stranded, linear
  immediate source library: GENBANK
  immediate source clone: g219667
ggccagggatcaggcagcggctcaggcgaccctgagtgtgcccccaccccgccatggcccggctgctgcaggcgtcctgcctgctttccctgctcctggccggcttcgtctcgcagagccggggacaagagaagtcgaagatggactgccatggtggcataagtggcaccatttacgagtacggagccctcaccattgatggggaggagtacatccccttcaagcagtatgctggcaaatacgtcctctttgtcaacgtggccagctactgaggcctgacgggccagtacattgaactgaatgcactacaggaagagcttgcaccattcggtctggtcattctgggctttccctgcaaccaatttggaaaacaggaaccaggagagaactcagagatccttcctaccctcaagtatgtccgaccaggtggaggctttgtccctaatttccagctctttgagaaaggggatgtcaatggagagaaagagcagaaattctacactttcctaaagaactcctgtcctcccacctcggagctcctgggtacatctgaccgcctcttctgggaacccatgaaggttcacgacatccgctggaactttgagaagttcctggtggggccagatggtatacccatcatgcgctggcaccaccggaccacggtcagcaacgtcaagatggacatcctgtcctacatgaggcggcaggcagccctgggggtcaagaggaagtaactgaaggccgtctcatcccatgtccaccatgtaggggagggactttgttcaggaagaaatccgtgtctccaaccacactatctacccatcacagacccctttcctatcactcaaggccccagcctggcacaaatggatgcatacagttctgtgtactgccaggcatgtgggtgtgggtgcatgtgggtgtttacacacatgcctacaggtatgcgtgattgtgtgtgtgtgcatgggtgtacagccacgtgtcctacctatgtgtctttctgggaatgtgtaccatctgtgtgcctgcagctgtgtagtgctggacagtgacaaccctttctctccagttctccactccaatgataatagttcacttacacctaaacccaaaggaaaaaccagctctaggtccaattgttctgctctaactgatacctcaaccttggggccagcatctcccactgcctccaaatattagtaactatgactgacgtccccagaagtttctgggtctaccacactccccaaccccccactcctacttcctgaagggccctcccaaggctacatccccaccccacagttctccctgagagagatcaacctccctagatcaaccaaggcagatgtgacaagcaagggccacggaccccataggcaggggtggcgtcttcatgagggaggggcccaaagcccttgtgggcggacctcccctgagcctgtctgaggggccagcccttagtgcattcaggctaaggcccctgggcagggatgccaccctgctccttcggaggacgtgccctcacccctcactggtccactggcttgagactcaccccgtctgcccagtaaaagcctttctgcagcaaaaaaccccc

SEQ ID NO: 1212 - DNA, 2051 bp; single-stranded, linear
  immediate source library: GENBANK
  immediate source clone: g219866
cgccactttgctggagcattcactaggcgaggcgctccatcggactcactagccgcactcatgaatcggcaccatctgcaggatcactttctggaaatagacaagaagaactgctgtgtgttccgagatgacttcattgccaaggtgttgccgccggtgttggggctggagtttatctttgggcttctgggcaatggccttgccctgtggattttctgtttccacctcaagtcctggaaatccagccggattttcctgttcaacctggcagtagctgactttctactgatcatctgcctgccgttcgtgatggactactatgtgcggcgttcagactggaactttggggacatcccttgccggctggtgctcttcatgtttgccatgaaccgccagggcagcatcatcttcctcacggtggtggcggtagacaggtatttccgggtggtccatccccaccacgccctgaacaagatctccaattggacagcagccatcatctcttgccttctgtggggcatcactgttggcctaacagtccacctcctgaagaagaagttgctgatccagaatggccctgcaaatgtgtgcatcagcttcagcatctgccataccttccggtggcacgaagctatgttcctcctggagttcctcctgcccctgggcatcatcctgttctgctcagccagaattatctggagcctgcggcagagacaaatggaccggcatgccaagatcaagagagccatcaccttcatcatggtggtggccatcgtctttgtcatctgcttccttcccagcgtggttgtgcggatccgcatcttctggctcctgcacacttcgggcacgcagaattgtgaagtgtaccgctcggtggacctggcgttctttatcactctcagcttcacctacatgaacagcatgctggaccccgtggtgtactacttctccagcccatcctttcccaacttcttctccactttgatcaaccgctgcctccagaggaagatgacaggtgagccagataataaccgcagcacgagcgtcgagctcacaggggaccccaacaaaaccagaggcgctccagaggcgttaatggccaactccggtgagccatggagcccctcttatctgggcccaacctcaaataaccattccaagaagggacattgtcaccaagaaccagcatctctggagaaacagttgggctgttgcatcgagtaatgtcactggactcggcctaaggtttcctggaacttccagattcagagaatctgatttagggaaactgtggcagatgagtgggagactggttgcaaggtgtgaccacaggaatcctggaggaacagagagtaaagcttctaggcatctgaaacttgcttcatctctgacgctcgcaggactgaagatgggcaaattgtaggcgtttctgctgagcagagttggagccagagatctacttgtgacttgttggccttcttcccacatctgcctcagactggggggggctcagctcctcgggtgatatctagcctgcttgtgagctctagcagggataaggagagctgagattggagggaattgtgttgctcctggaggaagcccaggcatcattaaacaagccagtaggtcacctggcttccgtggaccaattcatctttcagacaagctttagagaaatggactcagggaagagactcacatgctttggttagtatctgtgtttccggtgggtgtaataggggattagccccagaagggactgagctaaacagtgttattatgggaaaggaaatggcattgctgctttcaaccagcgactaatgcaatccattcctctcttgtttatagtaatctaagggttgagcagttaaaacggcttcaggatagaaagctgtttcccacctgtttcgttttaccattaaaagggaaacgtgcctctgccccacgggtagagggggtgcacgttcctcctggttccttcgcttgtgtttctgtacttaccaaaaatctaccacttcaataaattttgataggagacaaaaaaaaaa

SEQ ID NO: 1213 - DNA, 1664 bp; single-stranded, linear
  immediate source library: GENBANK
  immediate source clone: g219868
cggcagcaggtagcaaagtgacgccgagggcctgagtgctccagtagccaccgcatctggagaaccagcggttaccatggaggggatcagtatatacacttcagataactacaccgaggaaatgggctcaggggactatgactccatgaaggaaccctgtttccgtgaagaaaatgctaatttcaataaaatcttcctgcccaccatctactccatcatcttcttaactggcattgtgggcaatggattggtcatcctggtcatgggttaccagaagaaactgagaagcatgacggacaagtacaggctgcacctgtcagtggccgacctcctctttgtcatcacgcttcccttctgggcagttgatgccgtggcaaactggtactttgggaacttcctatgcaaggcagtccatgtcatctacacagtcaacctctacagcagtgtcctcatcctggccttcatcagtctggaccgctacctggccatcgtccacgccaccaacagtcagaggccaaggaagctgttggctgaaaaggtggtctatgttggcgtctggatccctgccctcctgctgactattcccgacttcatctttgccaacgtcagtgaggcagatgacagatatatctgtgaccgcttctaccccaatgacttgtgggtggttgtgttccagtttcagcacatcatggttggccttatcctgcctggtattgtcatcctgtcctgctattgcattatcatctccaagctgtcacactccaagggccaccagaagcgcaaggccctcaagaccacagtcatcctcatcctggctttcttcgcctgttggctgccttactacattgggatcagcatcgactccttcatcctcctggaaatcatcaagcaagggtgtgagtttgagaacactgtgcacaagtggatttccatcaccgaggccctagctttcttccactgttgtctgaaccccatcctctatgctttccttggagccaaatttaaaacctctgcccagcacgcactcacctctgtgagcagagggtccagcctcaagatcctctccaaaggaaagcgaggtggacattcatctgtttccactgagtctgagtcttcaagttttcactccagctaacacagatgtaaaagacttttttttatacgataaataacttttttttaagttacacatttttcagatataaaagactgaccaatattgtacagtttttattgcttgttggatttttgtcttgtgtttctttagtttttgtgaagtttaattgacttatttatataaattttttttgtttcatattgatgtgtgtctaggcaggacctgtggccaagttcttagttgctgtatgtctcgtggtaggactgtagaaaagggaactgaacattccagagcgtgtagttaatcacgtaaagctagaaatgatccccagctgtttatgcatagataatctctccattcccgtggaacgtttttcctgttcttaagacgtgattttgctgtagaagatggcacttataaccaaagcccaaagtggtatagaaatgctggtttttcagttttcaggagtgggttgatttcagcacctacagtgtacagtcttgtattaagttgttaataaaagtacatgttaaacttaaaaaaaaaa

SEQ ID NO: 1214 - DNA, 2427 bp; single-stranded, linear
  immediate source library: GENBANK
  immediate source clone: g219924
gcggcgccgcaggggattgaggggttgactgagcgttgcgagccttagctttctcccgaacgccagcgctgaggacacgatgtcgcggctctcccgctcactgctttgggccgccacctgcctgggcgtgctctgcgtgctgtccgcggacaagaacacgacccagcacccgaacgtgacgactttagcgcccatctccaacgtaacctcggcgccggtgacgtccctcccgctggtcaccactccggcaccagaaacctgtgaaggtcgaaacagctgcgtttcctgttttaatgttagcgttgttaatactacctgcttttggatagaatgtaaagatgagagctattgttcacataactcaacagttagtgattgtcaagtggggaacacgacagacttctgttccgtttccacggccactccagtgccaacagccaattctacagctaaacccacagttcagccctccccttctacaacttccaagacagttactacatcaggtacaacaaataacactgtgactccaacctcacaacctgtgcgaaagtctacctttgatgcagccagtttcattggaggaattgtcctggtcttggaaataagatgccacacaaggaactacattccagatttaaagaaatgaaaggataccattagtgtgtataacagattattgttcatacttgtaaagcaccttatgtcattgagaatataaagaacagtgccttagaagacagtgaaaggtaagctctagcttaatgtctatgatttgttctttgacattaaggaaggtaaggattggtcagaggatgtaacttgatgtgagcagtagtaaacctgttttagatatcatactgttaatattttattgaaaatttatttcagagcggagaaacttaagctaaagtctgttatacagaattgaaagccttcgtatcttgaacctcccaacatttttcttatggctgttgaaaagtatagagctaaattgatttaattacactttcctttgtactttaaaaaaaagtatgctagcactattgtaccttgaaaggatttccaccagactgtcttgagtagtgacttctttggtgaggcaagaaggatatacattattttagaatcatttactatttaaatgagacaatcatattattttagaatcatttattttaaatgagacaatcattttaagttttaagataacagaagtgaccaatgtaatttcacaacacctaaggattttttggttgatcaggttactgtagatttttactgattgtcctggatgaatagactgtgctttttctttttctctcccttccttcttggtttcccatagtataataagcatgcatactttaacttctatagttttctcctttagagggtcttcttcagttttagaggtttacttctcccttgcctttgactcattggactagtgcagaggctttaagtagtttaaaatgggcttttgcttttctaggtcattaacgttttttatttagtttctttagccaatagtggctgagtttcgcacttgattttcaatattttatagtaagaaatgacaaactgctttggttcatttcataaacaaactctgcatttagataactattaaaggttgttaagatgaagatttactgtttctttgttactcgttggtacagctgtttgttttacttgcacatttgtagatatacttaatgttttcaagtgccttaattgtttaaaatctctggcttcaaagtttcttggggaaaggtcggtttacctcacattttttgtttccattagtaatattctaggtacctcacaaaatgtattatggtgccatggctgttagtttttagtgagtgctgtaggattaattcgaaaataggcagaattccattcctcccaaggtggcaaaaattagctatactgatgtaattgtcatttacctgggtatgaattccctgacacacattcatgtcaacatatgtagcaaattttgtgaaaacacaacaatttgaagcttctgtaattttgagcactgctctaacaacaagcataatataaaattagttagattttgcaagtctacaaatgagctcttgcaacagaactcacagcctttttacttttttcccctaactttagcaatgtagtatcttgagccattaatttttgggtttttttaaaatccagaaggtatatagaaaccttttcagatttttcatctgatttgttcttgcagatgttcttctatcaaataccttattttaccttacagatatttgttgcacaggcagatactgctgtatttagacatttctatttcagttcattaaaaactgcaaaaccaatctgtatcatgtaccaaactgacttaaaataaatctacatgtttattgaattaaaacaaaaaaaaaa

SEQ ID NO: 1215 - DNA, 4638 bp; single-stranded, linear
  immediate source library: GENBANK
  immediate source clone: g219928
gatcaggggacgggatggggtacacagccagcccctgctcccccagcggggagacctgtttgcaccaagcagcggccctgggccagcgcaccatctgccactacatcgtggaggccggggcctcgctcatgaagacagaccagcaggtgagcagacggcaggcagggagcccacgagggcaccaaccaaacctttcccaaggtcctaggcgggagctggggctgggggctgtccctgggaagacacagtccagaccctgggaaacctgagccagcaggggaggagctggtgggcagagaggcctccctccctgaccaggccacagggaggtagagcccctgcctctcagcctgctaggggttaggcctgcctctggcccctgctgatcgcagctccgccctcctccagggcgacactccccggcagcgggctgagaaggctcaggacaccgagctggccgcctacctggagaaccggcagcactaccagatgatccagcgggaggaccaggagacggctgtgtagcgggccgcccacgggcagcaggagggacaatgcggccaggggacgagcgccttccttgcccacctcactgccacattccagtgggacggccacggggggacctaggccccagggaaagagccccatgccgccccctaaggagccgcccagacctagggctggactcaggagctgggggggcctcacctgttcccctgaggaccccgccggacccggaggctcacagggaacaagacacggctgggttggatatgcctttgccggggttctggggcagggcgctccctggccgcagcagatgccctcccaggagtgggaggggctggagagggggaggccttcgggaagaggcttcctgggccccctggtcttcggccgggtccccagcccccgctcctgccccaccccacctcctccgggcttcctcccggaaactcagcgcctgctgcacttgcctgccctgccttgcttggcacccgctccggcgaccctccccgctcccctgtcatttcatcgcggactgtgcggcctgggggtggggggcgggactctcacggtgacatgtttacagctgggtgtgactcagtaaagtggatttttttttcttttctgcttttcttcttttgcgggggaggtctaacaaccagcgggggctgcggggttgtcctcggggtgggggactggacgctgtcgacagcaccttcctggggccccggctcccgtttggtggttggtcccagggcctgcccggttcctgacctctgcccgcggccgcgctcgtcggggccgggcgggggccgatccctccggcttcccttcccgcggagaacaacaatgaaagtgaaagaggggtggggcgggggcgagcccgggttctgtggcccatttgccctgtggccttgagcaagcccctcccccaggcctcgggggctctcccggtttgggggaaccgggcgaggcaatgccacaggcccagggttagagggggtgggcacttgcagctgccgatgtggctggatctggaacttctcagacggctcctgtcagcgccaagtttcaccaaatccaggcctgcgggctcctcccccaggacccccactcgcagtccctcaagcctgtgctcccggaaaggcactgggcgaccgcacccgtggctttctctgggcgaccgggtcccagactccccccagcacagcagagcgcttccctgcccacccgcggaaaccgccccaggtggccgcgccccctccccagcagccagcagggcgccagggctgagccggccgtggaggggagcgggtcccgggggttatacaggcgccgggcgtccgcggcaggcaagagaagctgaggcctgagaacggcccgggccttggcgtacggcaggggacgacctgggatgggggcagcgggcggcggcgcagggagtgggccggggccggtgtgcgcgggcgggacggggccggggtcgggagaccaccgctcggaagatggggccgggagaggccgccgtcgcagcgcagagggcaccggcggggagacgcgaggacgcggggccgggaacacggacgccggagtagaagcgcggggggggcgggctggagcgggggcggggacgccggggtcgggggcggtgcgggtttgaggggagggggcggggcgggtccttccctgggggggtggggagagggggcgggggcccatgtgaccggctcagaccggttctggagacaaaaggggccgcggcggccggagcgggacgggcccggcgcgggagggagcgaagcagcgcgggcagcgagcgagtgagcgcgcggcggcccctggtccgcccgccgcggccgatctaggggctgggggctggaggcgggggtgggggtctgagctgcgtcctgggctcgaggcgtcccccggggagtcgcctcttagcggtgcgtccgggctagcggcgaggggccgccccaagtcttcccaccgccgccaccttagcagcccgacttggggcctggaaagtggagcactctgaggtgggagggccctgcacgcggccccggtggggaaggggacgggccagggattcagactcgggctctcccctcaggatgcagcaccgaggcttcctcctcctcaccctcctcgccctgctggcgctcacctccgcggtcgccaaaaagaaaggttatgggggatgatcgaaggagggctggggacgggcaggcgaggcccctccacttctgggctgggccgcctgggttcctagcctggaaccccaggaaggcgggtcccgagggagtctccccgtgccccagtcctgaactctgttcctcgcgcgttgtagataaggtgaagaagggcggcccggggagcgagtgcgctgagtgggcctgggggccctgcacccccagcagcaaggattgcggcgtgggtttccgcgagggcacctgcggggcccagacccagcgcatccggtgcagggtgccctgcaactggaagaaggagtttggaggtgaggcggggggcagtcagagggcaggagacgggggcacagcctcgccgaagcctggggggacccttggcggagggcggggccgcgggcgcgcagcctgacctgggccgctctctcgccagccgactgcaagtacaagtttgagaactggggtgcgtgtgatgggggcacaggcaccaaagtccgccaaggcaccctgaagaaggcgcgctacaatgctcagtgccaggagaccatccgcgtcaccaagccctgcacccccaagaccaaagcaaaggccaaaggtcagcgaaaggagaagggggtggggctgtcgcggggggctgccccccccccccccgcctgtgaggggacaattccaagttaaaccttaagttttgagtcctggccagtggcttcctgacatcgcctcacttggcttccctgcctggaaaagtctgaagatgggcactacaagagaggccgcaggtgatgctggggacataaatcctccctggcccaaatagggaccaactcaaactactccattggagcatctggcttaggacccagggagagtgtcctggaacggcttgcctttgtcagctctccagccacgggcagcatttggtcagctctgcctttctagtgttgggaggaggaggtcaagccaccctgggcctctcagctcactcgtgactcagcccagcgaggccagcagggcaggggtgaatctgcccgcttctcaggtgaggaggctgaggatgcccagggctgctgtgaccaggactaggactggaaacttgaaggttttctgatcccaagtggaaataggaagctggggatgtcccatgtccacatcacaatggctgccccatcccctgcttccgagtcagctgattggaaacacatagggggcagaatcttctccttccctgatgcccgggtgtttgtggagccggcggtctgcaatgggtcagcctaactgctgatatggtattaatattcttcttgttttacagccaagaaagggaagggaaaggactagacgccaagcctggatgccaaggagcccctggtgtcacatggggcctggcccacgccctccctctcccaggcccgagatgtgacccaccagtgccttctgtctgctcgttagctttaatcaatcatgcccctgccttgtccctctcactccccagccccacccctaagtgcccaaagtggggagggacaagggattctgggaagcttgagcctcccccaaagcaatgtgagtcccagagcccgctttgttcttccccacaattccattactaagaaacacatcaaataaactgactttttccccccaataaaagctcttcttttttaatatataaaagccccttcccaaggagttttgctgtggaaatgtgtttgggagtgggaaggtggggagaaagaccaggctgtagggactggtgggtttcagggggcttggtggtgggtgctctccagagctcatggaaaaagcagaacaattacaaacatttcttccagggcccctgaaagggtgctccccatcaagtcacctaagcctttcggtcctcatctccctcagggaccagggctggggaagggaacgt

SEQ ID NO: 1216 - DNA, 2287 bp; single-stranded, linear
  immediate source library: GENBANK
  immediate source clone: g219935
ggacagcacagctgacagccgtgctcagaaagtttctggatcccaggctcatctccacagaggagaacacgcaggcagcagagaccatggggcccatctcagccccttcctgcagatggcgcatcccctggcaggggctcctgctcacagcctcacttttcaccttctggaacccgcccaccactgctcagctcactattgaagctgtgccatccaatgctgcagaggggaaggaggttcttctacttgtccacaatctgccccaggaccctcgtggctacaactggtacaaaggggaaacagtggatgccaaccgtcgaattataggatatgtaatatcaaatcaacagattaccccagggcctgcatacagcaatcgagagacaatataccccaatgcatccctgctgatgcggaacgtcaccagaaatgacacaggatcctacaccctacaagtcataaagctaaatcttatgagtgaagaagtaactggccagttcagcgtacatccggagactcccaagccctccatctccagcaacaactccaaccccgtggaggacaaggatgctgtggccttcacctgtgaacctgagactcagaacacaacctacctgtggtgggtaaatggtcagagtctcccggtcagtcccaggctgcagctgtccaatggcaacaggaccctcactctactcagtgtcacaaggaatgacgtaggaccctatgaatgtgaaatacagaacccagcgagtgcaaacttcagtgacccagtcaccctgaatgtcctctatggcccagatgcccccaccatttccccttcagacacctattaccatgcaggggtaaatctcaacctctcctgccatgcggcctctaatccaccctcacagtattcttggtctgtcaatggcacattccagcaatacacacaaaagctctttatccccaacatcactacaaagaacagcggatcctatgcctgccacaccactaactcagccactggccgcaacaggaccacagtcaggatgatcacagtctctgatgctgtagtacaaggaagttctcctggcctctcagctagagccactgtcagcatcatgattggagtactggccagggtggctctgatatagtagctctggtgtagtttctgcatttcaagaagactggcagacagttgtttttattcttcctcaaagcatttgcaatcagctaccattcaaaattgcttcttcttcaagatttatggaaaatactctgacgagtactcttgaacacaagttcctgataactttaagatcacgccactggactgtctatgaacttgcaaacaggctgatacctttgtgaagttgcccaccaaaacacagaaggaaaaaaacatgaatttcattgaactaaataataatgaggataatgtttttaagattttttttttttttttttttgagatggaatctcgctctgtcgcccaggctggagtgcagtggcacgatctcaactcactgcaacgtccgcctcctgggttcacaccattctcctgcctcagcctcctgagtagctgggactacaggcgcctgccacaacgcccggctaattttttgtatttttagtagagacggggtttcactgtggtctcaatctcctgacttcatggtccgcctgcctcagcctcccaaagttctgggattacaggtgtgagccaccgcgcccagcccgtttttaagattttttatttgaaaaattgccaattctttaagtgttttctttttcagatttatgaatttctttatcttttaagctatctataccttactgcaatttggtaaagcagacttttgtgaacaaaaattataacatttacttttgctccctacctgactgccacagaactgggcaactattcatgagtattcatatgtttatggtaattcagttatttgcacaagttcagtgagaatctgctgtctttataatgggatatagtttaaaacattggttatattaccaaggctttgattgggatgttatatttgagaaaatacagagaatgatagattaacggagtgtctaatctatcgtgtcaaccccaaatttttacgtatgagatcctttagtccacccaatggctgacagtaacagcatctttaacacaactctttgttcaaatgtactatggtctcttttagagtcagactcctagactcacttgttctcactgtctgttttaatttaacccaggcatgcaatgctagataataaaattgctccctattggctgatc

SEQ ID NO: 1217 - DNA, 2294 bp; single-stranded, linear
  immediate source library: GENBANK
  immediate source clone: g220138
cagcgccggctcgcgccctcctgccgcagccaccgagccgccgtctagcgccccgacctcgccaccatgagagccctgctggcgcgcctgcttctctgcgtcctggtcgtgagcgactccaaaggcagcaatgaacttcatcaagttccatcgaactgtgactgtctaaatggaggaacatgtgtgtccaacaagtacttctccaacattcactggtgcaactgcccaaagaaattcggagggcagcactgtgaaatagataagtcaaaaacctgctatgaggggaatggtcacttttaccgaggaaaggccagcactgacaccatgggccggccctgcctgccctggaactctgccactgtccttcagcaaacgtaccatgcccacagatctgatgctcttcagctgggcctggggaaacataattactgcaggaacccagacaaccggaggcgaccctggtgctatgtgcaggtgggcctaaagccgcttgtccaagagtgcatggtgcatgactgcgcagatggaaaaaagccctcctctcctccagaagaattaaaatttcagtgtggccaaaagactctgaggccccgctttaagattattgggggagaattcaccaccatcgagaaccagccctggtttgcggccatctacaggaggcaccgggggggctctgtcacctacgtgtgtggaggcagcctcatcagcccttgctgggtgatcagcgccacacactgcttcattgattacccaaagaaggaggactacatcgtctacctgggtcgctcaaggcttaactccaacacgcaaggggagatgaagtttgaggtggaaaacctaatcctacacaaggactacagcgctgacacgcttgctcaccacaacgacattgccttgctgaagatccgttccaaggagggcaggtgtgcgcagccatcccggactatacagaccatctgcctgccctcgatgtataacgatccccagtttggcacaagctgtgagatcactggctttggaaaagagaattctaccgactatctctatccggagcagctgaaaatgactgttgtgaagctgatttcccaccgggagtgtcagcagccccactactacggctctgaagtcaccaccaaaatgctgtgtgctgctgacccacagtggaaaacagattcctgccagggagactcagggggacccctcgtctgttccctccaaggccgcatgactttgactggaattgtgagctggggccgtggatgtgccctgaaggacaagccaggcgtctacacgagagtctcacacttcttaccctggatccgcagtcacaccaaggaagagaatggcctggccctctgagggtccccagggaggaaacgggcaccacccgctttcttgctggttgctattttgcagtagagtcatctccatcagctgtaagaagagctgggaatataggctctgcacagatggatttgcctgtgccaccaccagggcgaacgacaatagctttaccctcaggcataggcctgggtgctggctgcccagacccctctggccaggatggaggggtggtcctgactcaacatgttactgaccagcaacttgtctttttctggactgaagcctgcaggagttaaaaagggcagggcatctcctgtgcatgggctcgaagggagagccagctcccccgaccggtgggcatttgtgaggcccatggttgagaaatgaataatttcccaattaggaagtgtaagcagctgaggtctcttgagggagcttagccaatgtgggagcagcggtttggggagcagagacactaacgacttcagggcagggctctgatattccatgaatgtatcaggaaatatatatgtgtgtgtatgtttgcacacttgtgtgtgggctgtgagtgtaagtgtgagtaagagctggtgtctgattgttaagtctaaatatttccttaaactgtgtggactgtgatgccacacagagtggtctttctggagaggttataggtcactcctggggcctcttgggtcccccacgtgacagtgcctgggaatgtattattctgcagcatgacctgtgaccagcactgtctcagtttcactttcacatagatgtccctttcttggccagttatcccttccttttagcctagttcatccaatcctcactgggtggggtgaggaccactcctgtacactgaatatttatatttcactatttttatttatatttttgtaattttaaataaaagtgatcaataaaatgtgatttttctgatg

SEQ ID NO: 1218 - DNA, 1988 bp; single-stranded, linear
  immediate source library: GENBANK
  immediate source clone: g232582
ccaggagccgctgttgcctcccagcccctgctagctgccccccgagccgagcgcagcgagcgccgccgcccgggccccccggtggggccagggccagcatggagcacctgggtccgcaccacctccacccgggtcacgcagagcccattagcttcggcatcgaccagatcctcaacagcccggaccagggtggctgcatgggacccgcctcgcgcctccaggacggagaatacggccttggctgcttggtcggaggcgcctacacttacggcggcgggggctccgcggccgcgacgggggctggaggagcgggggcctatggtactggaggtcccggcggccccggaggcccggcaggcggcggcggcgcctgcagcatgggtcctctgaccggctcctacaacgtgaacatggccttggcaggcggccccggtcctggcggcggcggcggcagcagcggcggtgccggggcactcagcgctgcgggggtaatccgggtgccggcacacaggccgctcgccggagccgtggcccacccccagcccctggccaccggcttgcccaccgtgccctctgtgcctgccatgccgggcgtcaacaacctcactggcctcaccttcccctggatggagagtaaccgcagatacacaaaggacaggttcacaggtcacccctatcagaaccggacgccccccaagaagaagaagccgcgcacgtccttcacacgcctgcagatctgcgagctggagaagcgcttccaccgccagaagtacctggcctcggccgagcgcgccgccctggccaaggcgctcaaaatgaccgatgcgcaggtcaaaacctggttccagaaccggcggacaaagtggagacggcagactgcggaggaacgggaggccgagaggcagcaagcgaaccgcatcctccggcagttgcagcaggaggccttccagaagagcctggcacagccgctgcccgctgaccctctgtgcgtgcacaactcgtcgctcttcgccctgcagaatctgcagccgtggtctgacgactcgaccaaaatcactagcgtcacgtcggtagcgtcggcctgcgagtgagcctgcccattctgccctgtgggaccccaggcccactcaggggtcactgaggcctgagacccaggactcctccccaccctcctggcctcagactgcacccaggaggggaacactgccctcgcacggccccgaagggcccccacatttgtgccgacactgttctcccttcggtggaagaactcaagggacaaggacacgcgcccccctcccagaggcgtcccgcacctgtctgaactgttaagaaatctgtttttgtttatttcattttattttaatttttaacgtgggattcagagaaaggcaagggaggtaagggaggaggagcttctggggtccccagggctgtcatctgaatttgccctgggaaaccccttctctgtgacccacttctcatcacacacatggaaacccataggcccacacacaggtggtgtcactgtccctcctggtgtcaccccagagccacacatgggcatctatgggagagtgtcaaccagacagagggtcacagtgtttacactttggaccttacgatcaggcacaggtcaggggtgacacagactcatcctgaacagcatggcactccctccagcacaaacacaaggtcatggccacactgtgacacactacaccacacacaacagccaacagctacaacagcctcacttggtctgccaggcccccaccacacatcccagcccaatccaggtacgcacagacaggttttcacataaatgcagcccatttctccagaacccatttgaggggtgggggggtgttaatttatgcacttataaggtgttttctgtgtaaccattttataaagtgcttgtgtaatttatgtgaaaaaaataaataaaagctccggatccggaaaaaaaaaaaaaaaaaaaaaaa

SEQ ID NO: 1219 - DNA, 3492 bp; single-stranded, linear
  immediate source library: GENBANK
  immediate source clone: g235648
gggagcacatgccggctcagagaatactatgaccagacagctcagatgtgctgcagcaaatgctcgccgggccaacatgcaaaagtcttctgtaccaagacctcggacaccgtgtgtgactcctgtgaggacagcacatacacccagctctggaactgggttcccgagtgcttgagctgtggctcccgctgtagctctgaccaggtggaaactcaagcctgcactcgggaacagaaccgcatctgcacctgcaggcccggctggtactgcgcgctgagcaagcaggaggggtgccggctgtgcgcgccgctgcgcaagtgccgcccgggcttcggcgtggccagaccaggaactgaaacatcagacgtggtgtgcaagccctgtgccccggggacgttctccaacacgacttcatccacggatatttgcaggccccaccagatctgtaacgtggtggccatccctgggaatgcaagcatggatgcagtctgcacgtccacgtcccccacccggagtatggccccaggggcagtacacttaccccagccagtgtccacacgatcccaacacacgcagccaactccagaacccagcactgctccaagcacctccttcctgctcccaatgggccccagccccccagctgaagggagcactggcgacttcgctcttccagttggactgattgtgggtgtgacagccttgggtctactaataataggagtggtgaactgtgtcatcatgacccaggtgaaaaagaagcccttgtgcctgcagagagaagccaaggtgcctcacttgcctgccgataaggcccggggtacacagggccccgagcagcagcacctgctgatcacagcgccgagctccagcagcagctccctggagagctcggccagtgcgttggacagaagggcgcccactcggaaccagccacaggcaccaggcgtggaggccagtggggccggggaggcccgggccagcaccgggagctcagattcttcccctggtggccatgggacccaggtcaatgtcacctgcatcgtgaacgtctgtagcagctctgaccacagctcacagtgctcctcccaagccagctccacaatgggagacacagattccagcccctcggagtccccgaaggacgagcaggtccccttctccaaggaggaatgtgcctttcggtcacagctggagacgccagagaccctgctggggagcaccgaagagaagcccctgccccttggagtgcctgatgctgggatgaagcccagttaaccaggccggtgtgggctgtgtcgtagccaaggtgggctgagccctggcaggatgaccctgcgaaggggccctggtccttccaggcccccaccactaggactctgaggctctttctgggccaagttcctctagtgccctccacagccgcagcctccctctgacctgcaggccaagagcagaggcagcgagttgtggaaagcctctgctgccatggcgtgtccctctcggaaggctggctgggcatggacgttcggggcatgctggggcaagtccctgactctctgtgacctgccccgcccagctgcacctgccagcctggcttctggagcccttgggttttttgtttgtttgtttgtttgtttgtttgtttctccccctgggctctgccccagctctggcttccagaaaaccccagcatccttttctgcagaggggctttctggagaggagggatgctgcctgagtcacccatgaagacaggacagtgcttcagcctgaggctgagactgcgggatggtcctggggctctgtgcagggaggaggtggcagccctgtagggaacggggtccttcaagttagctcaggaggcttggaaagcatcacctcaggccaggtgcagtggctcacgcctatgatcccagcactttgggaggctgaggcgggtggatcacctgaggttaggagttcgagaccagcctggccaacatggtaaaaccccatctctactaaaaatacagaaattagccgggcgtggtggcgggcacctatagtcccagctactcagaagcctgaggctgggaaatcgtttgaacccgggaagcggaggttgcagggagccgagatcacgccactgcactccagcctgggcgacagagcgagagtctgtctcaaaagaaaaaaaaaaagcaccgcctccaaatgctaacttgtccttttgtaccatggtgtgaaagtcagatgcccagagggcccaggcaggccaccatattcagtgctgtggcctgggcaagataacgcacttctaactagaaatctgccaattttttaaaaaagtaagtaccactcaggccaacaagccaacgacaaagccaaactctgccagccacatccaaccccccacctgccatttgcaccctccgccttcactccggtgtgcctgcagccccgcgcctccttccttgctgtcctaggccacaccatctcctttcagggaatttcaggaactagagatgactgagtcctcgtagccatctctctactcctacctcagcctagaccctcctcctcccccagaggggtgggttcctcttccccactccccaccttcaattcctgggccccaaacgggctgccctgccactttggtacatggccagtgtgatcccaagtgccagtcttgtgtctgcgtctgtgttgcgtgtcgtgggtgtgtgtagccaaggtcggtaagttgaatggcctgccttgaagccactgaagctgggattcctccccattagagtcagccttccccctcccagccagggccctgcagaggggaaaccagtgtagccttgcccggattctgggaggaagcaggttgaggggctcctggaaaggctcagtctcaggagcatggggataaaggagaaggcatgaaattgtctagcagagcaggggcagggtgataaattgttgataaattccactggacttgagcttggcagctgaactattggagggtgggagagcccagccattaccatggagacaagaagggttttccaccctggaatcaagatgtcagactggctggctgcagtgacgtgcacctgtactcaggaggctgaggggaggatcactggagcccaggagtttgaggctgcagcgagctatgatcgcgccactacactccagcctgagcaacagagtgagaccctgtctcttaaagaaaaaaaaagtcagactgctgggactggccaggtttctgcccacattggacccacatgaggacatgatggagcgcacctgccccctggtggacagtcctgggagaacctcaggcttccttggcatcacagggcagagccgggaagcgatgaatttggagactctgtggggccttggttcccttgtgtgtgtgtgttgatcccaagacaatgaaagtttgcactgtatgctggacggcattcctgcttatcaataaacctgtttgttttacacgtcgaaaaaaaa

SEQ ID NO: 1220 - DNA, 3547 bp; single-stranded, linear
  immediate source library: GENBANK
  immediate source clone: g23896
gcactcgcccggctcgcccgctttcgcacccagttcacgcgccacagctatgtgtccccgagccgcgcgggcgcccgcgacgctactcctcgccctgggcgcggtgctgtggcctgcggctggcgcctgggagcttacgattttgcacaccaacgacgtgcacagccggctggagcagaccagcgaggactccagcaagtgcgtcaacgccagccgctgcatgggtggcgtggctcggctcttcaccaaggttcagcagatccgccgcgccgaacccaacgtgctgctgctggacgccggcgaccagtaccagggcactatctggttcaccgtgtacaagggcgccgaggtggcgcacttcatgaacgccctgcgctacgatgccatggcactgggaaatcatgaatttgataatggtgtggaaggactgatcgagccactcctcaaagaggccaaatttccaattctgagtgcaaacattaaagcaaaggggccactagcatctcaaatatcaggactttatttgccatataaagttcttcctgttggtgatgaagttgtgggaatcgttggatacacttccaaagaaaccccttttctctcaaatccagggacaaatttagtgtttgaagatgaaatcactgcattacaacctgaagtagataagttaaaaactctaaatgtgaacaaaattattgcactgggacattcgggttttgaaatggataaactcatcgctcagaaagtgaggggtgtggacgtcgtggtgggaggacactccaacacatttctttacacaggcaatccaccttccaaagaggtgcctgctgggaagtacccattcatagtcacttctgatgatgggcggaaggttcctgtagtccaggcctatgcttttggcaaatacctaggctatctgaagatcgagtttgatgaaagaggaaacgtcatctcttcccatggaaatcccattcttctaaacagcagcattcctgaagatccaagcataaaagcagacattaacaaatggaggataaaattggataattattctacccaggaattagggaaaacaattgtctatctggatggctcctctcaatcatgccgctttagagaatgcaacatgggcaacctgatttgtgatgcaatgattaacaacaacctgagacacacggatgaaatgttctggaaccacgtatccatgtgcattttaaatggaggtggtatccggtcgcccattgatgaacgcaacaatggcacaattacctgggagaacctggctgctgtattgccctttggaggcacatttgacctagtccagttaaaaggttccaccctgaagaaggcctttgagcatagcgtgcaccgctacggccagtccactggagagttcctgcaggtgggcggaatccatgtggtgtatgatctttcccgaaaacctggagacagagtagtcaaattagatgttctttgcaccaagtgtcgagtgcccagttatgaccctctcaaaatggacgaggtatataaggtgatcctcccaaacttcctggccaatggtggagatgggttccagatgataaaagatgaattattaagacatgactctggtgaccaagatatcaacgtggtttctacatatatctccaaaatgaaagtaatttatccagcagttgaaggtcggatcaagttttccacaggaagtcactgccatggaagcttttctttaatatttctttcactttgggcagtgatctttgttttataccaatagccaaaaattctccttgcctttaatgtgtgaaactgcattttttcaagtgagattcaaatctgccttttaggacctggctttgtgacagcaaaaaccatctttacaggctcctagaagctgaaggttagagcattataaaatgaagagacagacatgattactcagggtcagcaacctagtgagttagaaaaaaaattaacatagggccctataaggagaaagccaactatgttaagtttacgtgtccaaattttaatgaaattttactaacaattttaaaccatatttttcttcttcatatccatttctaatccatcaaacagcttatgtttacataaaattttatcattcacaaggaagttttaagcacactgtctcatttgatatccacaacttatttttggtaggaaagagagatgtttttcccacctgtcagatgaaaaaactgaagctcaaaaagggttgacttgaccatacagctaatgctgacagatccaagacctagacctaggtcttttgaactcaagtccagcattctcaactatatcaagttactgttcagaatacttaatatctcctctcttcataattatcaatagccccaagctcatggatgacaaatctctgctttatttcttgtctctattttttcactttatagctcctgttataatagcaagtttaatggtataaacacaggataccatcctctcttgcaacacccatgtgcctttgatgagtcaggtagcaagctgtagtagataatgagaaaggccagaggctgcaaagacagtcaaaggacacgagagaaaggaaggggaagaacaggactccaggactgttttatattatagaaaagcaagagctaaagagcatttacacatgttaaacagatacttgttaagcatagtgcctgacacacggcattagctgttattttatgagattccatcagctctgcctctgtcctctttcttctaacatgaaggtatcatgagaagagaaccttctaacataagctgtaattctaaacctgcacttgtccctctccagcaagaggctagcactgaattcattctactcatactacacacccagttatggaatgtccagagttctcgaagaaaataaatgactttaggaagaggtatacattttttaagtcgctctgcctccaaatctgaacagtcactgtaaatcattcttaagcccagatatgagaacttctgctggaaagtgggaccctctgagtgggtggtcagaaaatacccatgctgatgaaatgacctatgcccaaagaacaaatacttaacgtgggagtggaaccacatgagcctgctcagctctgcataagtaattcaagaaatgggaggcttcaccttaaaaacagtgtgcaaatggcagctagaggttttgataggaagtatgtttgtttcttagtgtttacaaatattaagtactcttgatacaaaatatacttttaaacttcataacctttttataaaagttgttgcagcaaaataatagcctcggttctatgcatatatggattgctataaaaaatgtcaataagattgtacaaggaaaattagagaaagtcacatttagggtttattttttacacttggccagtaaaatagggtaaatcctattagaaattttttaaagaactttttttaagtttcctaaatctgtgtgtgtattgtgaagtggtataagaaatgactttgaaccactttgcaattgtagattcccaacaataaaattgaagat

SEQ ID NO: 1221 - DNA, 2147 bp; single-stranded, linear
  immediate source library: GENBANK
  immediate source clone: g243493
gaattccgcgctttgcagagaaagcccccctggctcttctctctcaatccataatccagcgatgctgcagctgtaaaagcattaatagaaaatcaatccacaacctcgcggggcagcgatcgtcgagcgccgtttccaggctgccttccctggggtcgggagcggccccgctccccccgtggctggcgcgaaatgtggtgatccgtcccggggcggggatgacttcatgcagccggagctccgcggcgggagcggaggctgctgctggcaggtggggcgcgggccggcgcgagctgaccgagcactcggcgggcgcggcgggactgcggcccgtggcggcgtgcgcgggacctgcgctgactaggtccggggaagtttcctgactttctgagaagccctggtttccccaaagaagtgacttttctgatagaaatctgaaggtcatctccaagaaaaaagagatctagtatagtcaatgaattaaagacaagaaggtttccaatcagtccctgctatgtggatatttggtagcaatgactgatgtggaaactacatatgcagattttattgcttcaggaagaacaggtagaagaaatgcaatacatgatatcctggtttcctctgcaagtggcaacagcaatgaattagccttgaaattagcaggtcttgatatcaacaagacagaaggtgaagaagatgcacaacgaagttctacagaacaaagtggggaagcccagggagaagcagcaaaatctgaaagctaacaccccactttgaccctcgaccacacctgaaaatgtctcaaatctccaggagtatctggaatgcatttgtttccatgagtgaaaagaggaaaaagaaaatggctgtgctgcattgcaggaacctgctcattatcatgttaaaaatgagggcagaggctgtggctgcaggcagacttttccctacctctgtcattagcaatggttgaaatcatgtggcttgtgtttgggcgtcatttttgtatggatcctttcacttgatcatatgacgaaatgcttatagagagtagctccgacctagatgatgattcttcctgtagcatctggcccctcacaatgtcagaggatttaattgtgtctaattgcgaagggttgattgaaccccagagtttaaatatctctggctcaagtgttcacccagtaaaagaaagatccagaaagcactgtttttagcattacgtatctgtgtgttactgctgtgttatttacactgttttgtattgtacaatatatatgctcagcactgccccctctctgattgcttatgaaaacaaaatgatgtacattactgtgaatttttataccactcatttttaaaagggctgtcttttcattttagttttccatactgtggtggtgtacacaggatagaacacccttttttaaaacacagtctttccccttgctcattgtatgttgatgagttgattaagtctaacagattcatcaagactccattgctttattatagagacatttgaaaatatccattaatgtgaatatcacctgaattcaatctgtcaaatttgttttattctcaagtggagaacttctcccacataatatatatatatatatatattttaatttatgagaattttggacaattggaaaggtagaaaagaaaagccaagatcatactaaggactggaaatattttgttctatggaatcaaatttctcacaatgctgtatgatactatttaaatttggaggacaacttatcttcactaagctgaatcaggtggagaaagtaatctccttgcaatcatgtggacaccaatcacaaaagtaaagccctggtgttgtgttttcatgtcttttttcagccctctcagatccaaatgttattatgcactttttaatgtttgtaaacttttactaataattagtgtgaattgcattctgatacaataatgattatcattagaagctaacaaaattctcattaatactgtgtttgatggcctctgctgtgttttaacatcgtgcttcttatatggaaagtttttgtgagctgtgtaatccctctggtcagtattatgaaatcatttgtcagtggtaataaataaggaaccagtaaaaaaaaaaaaaaaaaaaggaattc

SEQ ID NO: 1222 - DNA, 262 bp; single-stranded, linear
  immediate source library: GENBANK
  immediate source clone: g243543
cagtactggcccaacagaggcacggagacctacggcttcatccaggtcacgttgctagataccatcgagctggccacattctgcgtcaggacattctctctgcacaagaatggctccagtgagaaacgcgacgtccgccagttccagtttacggcgtggccggaccatggcgtgcccgaatacccaacgcccttcctggctttcctgcggagagtcaagacctgcaacccaccagatgccggccccatcgtggcgcactgca

SEQ ID NO: 1223 - DNA, 705 bp; single-stranded, linear
  immediate source library: GENBANK
  immediate source clone: g243865
ttgtgacaaaactcacacatgcccaccgtgcccagcacctgaactcctggggggaccgtcagtcttcctcttccccccaaaacccaaggacaccctcatgatctcccggacccctgaggtcacatgcgtggtggtggacgtgagccacgaagaccctgaggtcaagttcaactggtacgtggacggcgtggaggtgcataatgccaagacaaagccgcgggaggagcagtacaacagcacgtaccgtgtggtcagcgtcctcaccgtcctgcaccaggactggctgaatggcaaggagtacaagtgcaaggtctccaacaaagccctcccagcccccatcgagaaaaccatctccaaagccaaagggcagccccgagaaccacaggtgtacaccctgcccccatcccgggatgagctgaccaagaaccaggtcagcctgacctgcctggtcaaaggcttctatcccagcgacatcgccgtggagtgggagagcaatgggcagccggagaacaactacaagaccacgcctcccgtgctggactccgacggctccttcttcctctacagcaagctcaccgtggacaagagcaggtggcagcaggggaacgtcttctcatgctccgtgatgcatgaggctctgcacaaccactacacgcagaagagcctctccctgtctccgggtaaatgagtgcgacggccaagctt

SEQ ID NO: 1224 - DNA, 540 bp; single-stranded, linear
  immediate source library: GENBANK
  immediate source clone: g243887
cttttcgatccgccatctgcggtggagccgcaaccaaaatgcagattttcgtgaaaacccttacggggaagaccatcaccctcgaggttgaaccctcggatacgatagaaaatgtaaaggccaagatccaggataaggaaggaattcctcctgatcagcagagactgatctttgctggcaagcagctagaagatggacgtactttgtctgactacaatattcaaaaggagtctactcttcatcttgtgttgagacttcgtggtggtgctaagaaaaggaagaagaagtcttacaccactcccaagaagaataagcacaagagaaagaaggttaagctggctgtcctgaaatattataaggtggatgagaatggcaaaattagtcgccttcgtcgagagtgcccttctgatgaatgtggtgctggggtgtttatggcaagtcactttgacagacattattgtggcaaatgttgtctgacttactgtttcaacaaaccagaagacaagtaactgtatgagttaataaaagacatgaactaac

SEQ ID NO: 1225 - DNA, 686 bp; single-stranded, linear
  immediate source library: GENBANK
  immediate source clone: g246741
cggctctgaactaggtggatcctgtggtaccctaggcctatcaagtgctatatgcctggctctttctgtgttgattgacacaacatctgactcgactgagtcagaaaaaaatcagtcattacttaataagtaaccaacaccttgacttggtgcatgtattgagactctcttgtttttctttttgcaaggcctcaaggggaaggtatatcaggaacctttgtcccccaatgcctgcatggatactacagcaatactacaacctcacagaagctgcttaacccatggatcctgaaaacataggcaagaagcacaggtcctgatgagtggatctttactacttttaccagattcctccctcgctcagaggatcctcccacacacccagcagagactctctgtccaccatcaaccccccaagtcataggggctcaagttctgccctggtgagctgtggcccccatccttgtgaaccccaaagtgtcccccttgtggaaccaaatgtatccatcttgaataaatttgcccaaaatcctaaagaccgggaaaagggaaccattgagcttggcaagtactggggaacatctttgcttcctgcatctctagcaccagatcactatgagtatggaccacccatttcagaacagccgccaaatgctgaggttagagagggttacttatgtcaggca

SEQ ID NO: 1226 - DNA, 2403 bp; single-stranded, linear
  immediate source library: GENBANK
  immediate source clone: g247306
ggagactcccacgtggacaccagctccaccgtgtccgaggcggtggccgaagaagtatctcttttcagcatgacggacatgattctgttttcgctcatcgtgggtctcctaacctactggttcctcttcagaaagaaaaaagaagaagtccccgagttcaccaaaattcagacattgacctcctctgtcagagagagcagctttgtggaaaagatgaagaaaacggggaggaacatcatcgtgttctacggctcccagacggggactgcagaggagtttgccaaccgcctgtccaaggacgcccaccgctacgggatgcgaggcatgtcagcggaccctgaggagtatgacctggccgacctgagcagcctgccagagatcgacaacgccctggtggttttctgcatggccacctacggtgagggagaccccaccgacaatgcccaggacttctacgactggctgcaggagacagacgtggatctctctggggtcaagttcgcggtgtttggtcttgggaacaagacctacgagcacttcaatgccatgggcaagtacgtggacaagcggctggagcagctcggcgcccagcgcatctttgagctggggttgggcgacgacgatgggaacttggaggaggacttcatcacctggcgagagcagttctggccggccgtgtgtgaacactttggggtggaagccactggcgaggagtccagcattcgccagtacgagcttgtggtccacaccgacatagatgcggccaaggtgtacatgggggagatgggccggctgaagagctacgagaaccagaagcccccctttgatgccaagaatccgttcctggctgcagtcaccaccaaccggaagctgaaccagggaaccgagcgccacctcatgcacctggaattggacatctcggactccaaaatcaggtatgaatctggggaccacgtggctgtgtacccagccaacgactctgctctcgtcaaccagctgggcaaaatcctgggtgccgacctggacgtcgtcatgtccctgaacaacctggatgaggagtccaacaagaagcacccattcccgtgccctacgtcctaccgcacggccctcacctactacctggacatcaccaacccgccgcgtaccaacgtgctgtacgagctggcgcagtacgcctcggagccctcggagcaggagctgctgcgcaagatggcctcctcctccggcgagggcaaggagctgtacctgagctgggtggtggaggcccggaggcacatcctggccatcctgcaggactgcccgtccctgcggccccccatcgaccacctgtgtgagctgctgccgcgcctgcaggcccgctactactccatcgcctcatcctccaaggtccaccccaactctgtgcacatctgtgcggtggttgtggagtacgagaccaaggccggccgcatcaacaagggcgtggccaccaactggctgcgggccaaggagcctgtcggggagaacggcggccgtgcgctggtgcccatgttcgtgcgcaagtcccagttacgcctgcccttcaaggccaccacgcctgtcatcatggtgggccccggcaccgggtggcaccctttcataggcttcatccaggagcgggcctggctgcgacagcagggcaaggaggtgggggagacgctgctgtactacggctgccgccgctcggatgaggactacctgtaccgggaggagctggcgcagttccacagggacggtgcgctcacccagctcaacgtggccttctcccgggagcagtcccacaaggtctacgtccagcacctgctaaagcaagaccgagagcacctgtggaagttgatcgaaggcggtgcccacatctacgtctgtggggatgcacggaacatggccagggatgtgcagaacaccttctacgacatcgtggctgagctcggggccatggagcacgcgcaggcggtggactacatcaagaaactgatgaccaagggccgctactccctggacgtgtggagctaggggcctgcctgccccacccaccccacagactccggcctgtaatcagctctcctggctccctcccgtagtctcctgggtgtgtttggcttggccttggcatgggcgcaggcccagtgacaaagactcctctgggcctggggtgcatcctcctcagcccccaggccaggtgaggtccaccggcccctggcagcacagcccagggcctgcatgggggcaccgggctccatgcctctggagcctctggccctcggtggctgcacagaagggctctttctctctgctgagctggcccagcccctccacgtgatttccagtgagtgtaaataattttaaataacctctggcccttggaataaagttctgttttctgta

SEQ ID NO: 1227 - DNA, 1784 bp; single-stranded, linear
  immediate source library: GENBANK
  immediate source clone: g250802
tatgaccatgattacgaattcggggtacctcatgtgacaagttccaatttcttttcaagtcaattgaactgaaatctccttgttgctttgaaatcttagaagagagcccactaattcaaggactcttactgtaggagcaactgctggttctatcacaatgaaacggctggtttgtgtgctcttggtgtgctcctctgcagtggcacagttgcataaagatcctaccctggatcaccactggcatctctggaagaaaacctatggcaaacaatacaaggaaaagaatgaagaagcagtacgacgtctcatctgggaaaagaatctaaagtttgtgatgcttcacaacctggagcattcaatgggaatgcactcatacgatctgggcatgaaccacctgggagacatgaccagtgaagaagtgatgtctttgatgagttccctgagagttcccagccagtggcagagaaatatcacatataagtcaaaccctaatcggatattgcctgattctgtggactggagagagaaagggtgtgttactgaagtgaaatatcaaggttcttgtggtgcttgctgggctttcagtgctgtgggggccctggaagcacagctgaagctgaaaacaggaaagctggtgtctctcagtgcccagaacctggtggattgctcaactgaaaaatatggaaacaaaggctgcaatggtggcttcatgacaacggctttccagtacatcattgataacaagggcatcgactcagacgcttcctatccctacaaagccatggatcagaaatgtcaatatgactcaaaatatcgtgctgccacatgttcaaagtacactgaacttccttatggcagagaagatgtcctgaaagaagctgtggccaataaaggcccagtgtctgttggtgtagatgcgcgtcatccttctttcttcctctacagaagtggtgtctactatgaaccatcctgtactcagaatgtgaatcatggtgtacttgtggttggctatggtgatcttaatgggaaagaatactggcttgtgaaaaacagctggggccacaactttggtgaagaaggatatattcggatggcaagaaataaaggaaatcattgtgggattgctagctttccctcttacccagaaatctagaggatctctcctttttataacaaatcaatgaaatatgaagcactttctcttaacttaatttttcctgctgtatccagaagaaataattgtgtcatgattaatgtgtatttactgtactaattagaaaatatagtttgaggccgggcacgtggctcacgcgtaatcccgttacttgggaggccaaggcaggcattatcaatcttgaggccaggagttaaagagcagcctggctaacatggtgaaaccccatctctactaaaaatacaaaaaattagccgagcacggtggtgcatgcctgtaatcccagctacttgggaggctgaggcacgagattccttgaacccaagaggttgaggctatgttgagctgagatcacaccactgtactccagcctggatgacagagtggagactctgtttcaaaaaaacagaaaagaaaatatagtttgattcttcatttttttaaatttgcaaatctcaggataaagtttgctaagtaaattagtaatgtactatagatataactgtacaaaaattgttcaacctaaaacaatctgtaattgcttattgttttattgtcccgaattcagttggtttaatatattgtcctctgtaatttcgatccttcttaa

SEQ ID NO: 1228 - DNA, 895 bp; single-stranded, linear
  immediate source library: GENBANK
  immediate source clone: g252001
agagacttaagtctaaggcactgagcgtatcatgttaaagatgagcgggtggcagcgacagagccaaaatcagagctggaacctgaggagagagtgttcaagaaggaagtgtatcttcatacatcaccacacctgaaagcagatgtgcttttccagactgatccaactgcagagatggcagctgagtcattgcctttctcttcggacactgtcagctgggagctggaagcctggtatgaggacctgcaagaggtcctgtcttcagatgaaaatgggggtacctatgtttcacctcctggaaatgaagaggaagaatcaaaaatcttcaccactcttgaccctgcttctctggcttggctgactgaggaggagccagaaccagcagaggtcacaagcacctcccagagccctcactctccagattccagtcagagctccctggctcaggaggaagaggaggaagaccaagggagaaccaggaaacggaaacagagtggtcattccccagcccgggctggaaagcagcgcatgaaggagaaagaacaggagaatgaaaggaaagtggcacagctagctgaagagaatgaacggctcaagcaggaaatcgagcgcctgaccagggaagtagaggcgactcgccgagctctgattgaccgaatggtgaatctgcaccaagcatgaacaattgggagcatcagtcccccacttgggccacactacccacctttcccagaagtggctactgactaccctctcactagtgccaatgatgtgaccctcaatcccacatacgcagggggaaggcttggagtagacaaaaggaaaggtctcagcttgtatatagagattgtacatttatttattactgtccctatctattaaagtgactttctat

SEQ ID NO: 1229 - DNA, 3359 bp; single-stranded, linear
  immediate source library: GENBANK
  immediate source clone: g258761
cgccgaggtatcacctggcaccacccgcaccctcaccccgtgtctccatgccctgcctctgctccccacacccctcacctcaagctgtcccctcacctcacgcttggctgtctcctgatcctcagcctctcccaggtaccccagactctgtaggagagtgcccgagggcggagggccagccatgctgaccttccttccctccccccaggagctgttcacccgctcactggctgagagcgagctccgtagtgccccgtatgagttccccgaggagagccccattgaacagctggaggagcggcggcagcggctggagcggcagatcagccaggatgtcaagctggagccagacatcctgcttcgggccaagcaagatttcctgaagacggacagtgactcggacctacagctctacaaggaacagggtgaggggcagggtgacgggagcctgcgggagcgtgatgtgctggaacgggagtttcagcgggtcaccatctctggggaggagaagtgtggggtgccgttcacagacctgctggatgcagccaagagtgtggtgcgggcgctcttcatccgggagaagtacatggccctgtccctgcagagcttctgccccaccacccgccgctacctgcagcagctggctgaaaagcctctggagacccggacctatgaacagggccccgacacccctgtgtctgctgatgccccggtgcacccccctgcgctggagcagcacccgtatgagcactgtgagccaagcaccatgcctggggacctgggcttgggtctgcgcatggtgcggggtgtggtgcacgtctacacccgcagggaacccgacgagcattgctcagaggtggagctgccataccctgacctgcaggaatttgtggctgacgtcaatgtgctgatggccctgattatcaatggccccataaagtcattctgctaccgccggctgcagtacctgagctccaagttccagatgcatgtgctactcaatgagatgaaggagctggccgcccagaagaaagtgccacaccgagatttctacaacatccgcaaggtggacacccacatccatgcctcgtcctgcatgaaccagaagcatctgctgcgcttcatcaagcgggcaatgaagcggcacctggaggagatcgtgcacgtggagcagggccgtgaacagacgctgcgggaggtctttgagagcatgaatctcacggcctacgacctgagtgtggacacgctggatgtgcatgcggacaggaacactttccatcgctttgacaagtttaatgccaaatacaaccctattggggagtccgtcctccgagagatcttcatcaagacggacaacagggtatctgggaagtactttgctcacatcatcaaggaggtgatgtcagacctggaggagagcaaataccagaatgcagagctgcggctctccatttacgggcgctcgagggatgagtgggacaagctggcgcgctgggccgtcatgcaccgcgtgcactcccccaacgtgcgctggctggtgcaggtgccccgcctctttgatgtgtaccgtaccaagggccagctggccaacttccaggagatgctggagaacatcttcctgccactgttcgaggccactgtgcaccctgccagccacccggaactgcatctcttcttagagcacgtggatggttttgacagcgtggatgatgagtccaagcctgaaaaccatgtcttcaacctggagagccccctgcctgaggcgtgggtggaggaggacaacccaccctatgcctactacctgtactacacctttgccaacatggccatgttgaaccacctgcgcaggcagaggggcttccacacgtttgtgctgaggccacactgtggggaggctgggcccatccaccacctggtgtcagccttcatgctggctgagaacatttcccacgggctccttctgcgcaaggcccccgtcctgcagtacctgtactacctggcccagatcggcatcgccatgtctccgctcagcaacaacagcctcttcctcagctatcaccggaatccgctaccggagtacctgtcccgcggcctcatggtctccctgtccactgatgatcccttgcagttccacttcaccaaggagccgctgatggaggagtacagcatcgccacccaggtgtggaagctcagctcctgcgatatgtgtgagctggcccgcaacagcgtgctcatgagcggcttctcgcacaaggtaaagagccactggctgggacccaactataccaaggaaggccctgaggggaatgacatccgccggaccaatgtgccagacatccgcgtgggctaccgctacgagaccctgtgccaggagctggcgctcatcacgcaggcagtccagagtgagatgctggagaccattccagaggaggcgggtatcaccatgagcccagggcctcaatgagcctggtccatgaagtgcccaccacatcgcagcacttttaccacgttttgtcctcagaccccgcccatgctgtgtggtctctgcatgtctccattcttctctgtctctgtcttgcatgtctcctaccatgtcactgtccctgggccacccagtgaaagcaaagcctgggaatctgctcattgttgtttgggctcaggtattgagcctgatggcccaggtattgagggcctcccctgctggtggccctgtcctgggatcctcagaagcctgactgtcctatgggcttctccagtgtccacaggggcttgggatggttgtggggggctggcccctctagcctttccggtccttcctgggcaaatctaagccttggccagggcgaagtttaggcccctgtcttgttcatgtagccgaggggcaggcgggggacctctacacctctgctgtgggcacggggctgctgagggtctgtggaactccagcagctctgcactgggtagagctgggcctagagctcagtcacaggcctgggcttcctggcctgagtgggtagacgcaggcggcagaggtgctggaccacatctccgccaagtcactgcccagcagccttctccgtcctgtccccagcccacgtgctccttgggtgtcagcttcctgtgcctctgtgggagaggcagctgccttgtgttatgtctggggccacagttgctgcaaagtcctggatctgccactcaaccccgggagtggtgttcccagtgtggctcccagagctttgaccagattgtgatcccagctggcccctatgttgtgttctggactgaggcctttgctgtgaactgcagtgtttcatacgaaccatctttcctagtgcatgagaaataaagattatttaagt

SEQ ID NO: 1230 - DNA, 2492 bp; single-stranded, linear
  immediate source library: GENBANK
  immediate source clone: g260573
ctttgcaggcagcggcggccgggggcggagcgggatcgagccctcgccgaggcctgccgccatgggcccgcgccgccgccgccgcctgtcacccgggccgcgcgggccgtgagcgtcatggccttggccggggcccctgcgggcggcccatgcgcgccggcgctggaggccctgctcggggccggcgcgctgcggctgctcgactcctcgcagatcgtcatcatctccgccgcgcaggacgccagcgccccgccggctcccaccggccccgcggcgcccgccgccggcccctgcgaccctgacctgctgctcttcgccacaccgcaggcgccccggcccacacccagtgcgccgcggcccgcgctcggccgcccgccggtgaagcggaggctggacctggaaactgaccatcagtacctggccgagagcagtgggccagctcggggcagaggccgccatccaggaaaaggtgtgaaatccccgggggagaagtcacgctatgagacctcactgaatctgaccaccaagcgcttcctggagctgctgagccactcggctgacggtgtcgtcgacctgaactgggctgccgaggtgctgaaggtgcagaagcggcgcatctatgacatcaccaacgtccttgagggcatccagctcattgccaagaagtccaagaaccacatccagtggctgggcagccacaccacagtgggcgtcggcggacggcttgaggggttgacccaggacctccgacagctgcaggagagcgagcagcagctggaccacctgatgaatatctgtactacgcagctgcgcctgctctccgaggacactgacagccagcgcctggcctacgtgacgtgtcaggaccttcgtagcattgcagaccctgcagagcagatggttatggtgatcaaagcccctcctgagacccagctccaagccgtggactcttcggagaactttcagatctcccttaagagcaaacaaggcccgatcgatgttttcctgtgccctgaggagaccgtaggtgggatcagccctgggaagaccccatcccaggaggtcacttctgaggaggagaacagggccactgactctgccaccatagtgtcaccaccaccatcatctcccccctcatccctcaccacagatcccagccagtctctactcagcctggagcaagaaccgctgttgtcccggatgggcagcctgcgggctcccgtggacgaggaccgcctgtccccgctggtggcggccgactcgctcctggagcatgtgcgggaggacttctccggcctcctccctgaggagttcatcagcctttccccaccccacgaggccctcgactaccacttcggcctcgaggagggcgagggcatcagagacctcttcgactgtgactttggggacctcacccccctggatttctgacagggcttggagggaccagggtttccagagatgctcaccttgtctctgcagccctggagccccctgtccctggccgtcctcccagcctgtttggaaacatttaatttatacccctctcctctgtctccagaagcttctagctctggggtctggctaccgctaggaggctgagcaagccaggaagggaaggagtctgtgtggtgtgtatgtgcatgcagcctacacccacacgtgtgtaccgggggtgaatgtgtgtgagcatgtgtgtgtgcatgtaccggggaatgaaggtgaacatacacctctgtgtgtgcactgcagacacgccccagtgtgtccacatgtgtgtgcatgagtccatgtgtgcgcgtgggggggctctaactgcactttcggcccttttgctctgggggtcccacaaggcccagggcagtgcctgctcccagaatctggtgctctgaccaggccaggtggggaggctttggctggctgggcgtgtaggacggtgagagcacttctgtcttaaaggttttttctgattgaagctttaatggagcgttatttatttatcgaggcctctttggtgagcctggggaatcagcaaaggggaggaggggtgtggggttgataccccaactccctctacccttgagcaagggcaggggtccctgagctgttcttctgccccatactgaaggaactgaggcctgggtgatttatttattgggaaagtgagggagggagacagactgactgacagccatgggtggtcagatggtggggtgggccctctccagggggccagttcagggccccagctgccccccaggatggatatgagatgggagaggtgagtgggggaccttcactgatgtgggcaggaggggtggtgaaggcctcccccagcccagaccctgtggtccctcctgcagtgtctgaagcgcctgcctccccactgctctgccccaccctccaatctgcactttgatttgcttcctaacagctctgttccctcctgctttggttttaataaatattttgatgacgttaaaaaaaaaaaa

SEQ ID NO: 1231 - DNA, 214 bp; single-stranded, linear
  immediate source library: GENBANK
  immediate source clone: g265702
ggctcttgctctgttgcagattggcagatgccgcctccctatgtggtgctggacttgccgcaggagaccctggaggaggagacccccggcgccaacctgtggcccaccaccatcaccttcctcaccctcttcctgctgagcctgttctatagcacagcactgaccgtgaccagcgtccggggcccatctggcaacagggagggcccccagtact

SEQ ID NO: 1232 - DNA, 1849 bp; single-stranded, linear
  immediate source library: GENBANK
  immediate source clone: g28343
acaacactttatatatatttttataaatgtaaggggtacaaagtgccattttgttacatggatataccgtgtagtggtgaagcctgggcttttagtgtatctgtcatcagaataacatacgtgttacccataggaatttctcatcacccgccccctccacccttcgagtctccaatgtccattccacactctatatccacgtgtatgcatatagctccacatataagtgagaacatgtagtatttgacttcctctttctgagttatttcactttgataatggcctccacttccatccatgttgctgcaaaagacatgaccttattctttttgatagctggggagtactccattgtgtatatgtaccacatttnctttatccattcacccattgangaacacttagttgattccatatctttgctattgtcactagtgctgcaataaacatacatgtgcaggctccttctaatatactgatttatattttatggagagagatagagttcttagcgagtgtgctgtttatttctagtgtacttgcaactaatattctgtatactccctttaggtgattggagatttaacttagatctccagcaagtgctacaagaagaaaagatcctgaagaatcaatcaagtttccgtgaagtcaagtccaagtaacatccccgccttaaccacaagcaggagaaatgaagcacattatcaactcgtatgaaaacatcaacaacacagcaagaaataattccgactgtcctcgtgtggttttgccggaggagatatttttcacaatttccattgttggagttttggagaatctgatcgtcctgctggctgtgttcaagaataagaatctccaggcacccatgtactttttcatctgtagcttggccatatctgatatgctgggcagcctatataagatcttggaaaatatcctgatcatattgagaaacatgggctatctcaagccacgtggcagttttgaaaccacagccgatgacatcatcgactccctgtttgtcctctccctgcttggctccatcttcagcctgtctgtgattgctgcggaccgctacatcaccatcttccacgcactgcggtaccacagcatcgtgaccatgcgccgcactgtggtggtgcttacggtcatctggacgttctgcacggggactggcatcaccatggtgatcttctcccatcatgtgcccacagtgatcaccttcacgtcgctgttcccgctgatgctggtcttcatcctgtgcctctatgtgcacatgttcctgctggctcgatcccacaccaggaagatctccaccctccccagagccaacatgaaaggggccatcacactgaccatcctgctcggggtcttcatcttctgctgggccccctttgtgcttcatgtcctcttgatgacattctgcccaagtaacccctactgcgcctgctacatgtctctcttccaggtgaacggcatgttgatcatgtgcaatgccgtcattgaccccttcatatatgccttccggagcccagagctcagggacgcattcaaaaagatgatcttctgcagcaggtactggtagaatggctgatccctggttttagaatccatgggaataacgttgccaagtgccagaatagtgtaacattccaacaaatgccagtgctcctcactggccttccttccctaatggatgcaaggatgacccaccagctagtgtttctgaatactatggccaggaacagtctattgtaggggcaactctatttgtgactggacagataaaacgtgtagtaaaagaaggatagaatacaaagtattaggtacaaaagtaattanggtt

SEQ ID NO: 1233 - DNA, 478 bp; single-stranded, linear
  immediate source library: GENBANK
  immediate source clone: g28711
ccatgagggccagcagcttcttgatcgtggtggtgttcctcatcgctgggacgctggttctagaggcagctgtcacgggagttcctgttaaaggtcaagacactgtcaaaggccgtgttccattcaatggacaagatcccgttaaaggacaagtttcagttaaaggtcaagataaagtcaaagcgcaagagccagtcaaaggtccagtctccactaagcctggctcctgccccattatcttgatccggtgcgccatgttgaatccccctaaccgctgcttgaaagatactgactgcccaggaatcaagaagtgctgtgaaggctcttgcgggatggcctgtttcgttccccagtgagagggagccggtccttgctgcacctgtgccgtccccagagctacaggccccatctggtcctaagtccctgctgcccttccccttcccacactgtccattcttcctcccattcaggatgccca

SEQ ID NO: 1234 - DNA, 444 bp; single-stranded, linear
  immediate source library: GENBANK
  immediate source clone: g28805
atgggcacacgactcctcccagctctgtttcttgtcctcctggtattgggatttgaggtccaggggacccaacagccccagcaagatgagatgcctagcccgaccttcctcacccaggtgaaggaatctctctccagttactgggagtcagcaaagacagccgcccagaacctgtacgagaagacatacctgcccgctgtagatgagaaactcagggacttgtacagcaaaagcacagcagccatgagcacttacacaggcatttttactgaccaagttctttctgtgctgaagggagaggagtaacagccagaccccccatcagtggacaaggggagagtcccctactcccctgatcccccaggttcagactgagctcccccttcccagtagctcttgcatcctcctcccaactctagcctgaattcttttcaataaaaaata

SEQ ID NO: 1235 - DNA, 2458 bp; single-stranded, linear
  immediate source library: GENBANK
  immediate source clone: g28820
tgacccaataagggtggaaggctgagtcccgcagagccaataacgagagtccgagaggcgacggaggcggactctgtgaggaaacaagaagagaggcccaagatggagacggcggcggctgtagcggcgtgacaggagccccatggcacctgcccagccccacctcagcccatcttgacaaaatctaaggctccatggagccaccacggggcccccctgccaatggggccgagccatcccgggcagtgggcaccgtcaaagtatacctgcccaacaagcaacgcacggtggtgactgtccgggatggcatgagtgtctacgactctctagacaaggccctgaaggtgcggggtctaaatcaggactgctgtgtggtctaccgactcatcaagggacgaaagacggtcactgcctgggacacagccattgctcccctggatggcgaggagctcattgtcgaggtccttgaagatgtcccgctgaccatgcacaattttgtacggaagaccttcttcagcctggcgttctgtgacttctgccttaagtttctgttccatggcttccgttgccaaacctgtggctacaagttccaccagcattgttcctccaaggtccccacagtctgtgttgacatgagtaccaaccgccaacagttctaccacagtgtccaggatttgtccggaggctccagacagcatgaggctccctcgaaccgccccctgaatgagttgctaaccccccagggtcccagcccccgcacccagcactgtgacccggagcacttccccttccctgccccagccaatgcccccctacagcgcatccgctccacgtccactcccaacgtccatatggtcagcaccacggcccccatggactccaacctcatccagctcactggccagagtttcagcactgatgctgccggtagtagaggaggtagtgatggaaccccccgggggagccccagcccagccagcgtgtcctcggggaggaagtccccacattccaagtcaccagcagagcagcgcgagcggaagtccttggccgatgacaagaagaaagtgaagaacctggggtaccgggantcaggctattactgggaggtaccacccagtgaggtgcagctgctgaagaggatcgggacgggctcgtttggcaccgtgtttcgagggcggtggcatggcgatgtggccgtgaaggtgctcaaggtgtcccagcccacagctgagcaggcccaggctttcaagaatgagatgcaggtgctcaggaagacgcgacatgtcaacatcttgctgtttatgggcttcatgacccggccgggatttgccatcatcacacagtggtgtgagggctccagcctctaccatcacctgcatgtggccgacacacgcttcgacatggtccagctcatcgacgtggcccggcagactgcccagggcatggactacctccatgccaagaacatcatccaccgagatctcaagtctaacaacatcttcctacatgaggggctcacggtgaagatcggtgactttggcttggccacagtgaagactcgatggagcggggcccagcccttggagcagccctcaggatctgtgctgtggatggcagctgaggtgatccgtatgcaggacccgaacccctacagcttccagtcagacgtctatgcctacggggttgtgctctacgagcttatgactggctcactgccttacagccacattggctgccgtgaccagattatctttatggtgggccgtggctatctgtccccggacctcagcaaaatctccagcaactgccccaaggccatgcggcgcctgctgtctgactgcctcaagttccagcgggaggagcggcccctcttcccccagatcctggccacaattgagctgctgcaacggtcactccccaagattgagcggagtgcctcggaaccctccttgcaccgcacccaggccgatgagttgcctgcctgcctactcagcgcagcccgccttgtgccttaggccccgcccaagccaccagggagccaatctcagccctccacgccaaggagccttgcccaccagccaatcaatgttcgtctctgccctgatgctgcctcaggatcccccattccccaccctgggagatgagggggtccccatgtgcttttccagttcttctggaattgggggacccccgccaaagactgagccccctgtctcctccatcatttggtttcctcttggctttggggatacttctaaattttgggagctcctccatctccaatggctgggatttgtggcagggattccactcagaacctctctggaatttgtgcctgatgtgccttccactggattttggggttcccagcaccccatgtggattttggggggtcccttttgtgtctcccccgccattcaaggactcctctctttcttcaccaagaagcacagaattc

SEQ ID NO: 1236 - DNA, 816 bp; single-stranded, linear
  immediate source library: GENBANK
  immediate source clone: g288309
atgcactttctttgccaaaggcaaacgcagaacgtttcagagccatgaggatgcttctgcatttgagtttgctagctcttggagctgcctacgtgtatgccatccccacagaaattcccacaagtgcattggtgaaagagaccttggcactgctttctactcatcgaactctgctgatagccaatgagactctgaggattcctgttcctgtacataaaaatcaccaactgtgcactgaagaaatctttcagggaataggcacactggagagtcaaactgtgcaagggggtactgtggaaagactattgaaaaacttgtccttaataaagaaatacattgacggccaaaaaaaaaagtgtggagaagaaagacggagagtaaaccaattcctagactacctgcaagagtttcttggtgtaatgaacaccgagtggataatagaaagttgagactaaactggtttgttgcagccaaagattttggaggagaaggacattttactgcagtgagaatgagggccaagaaagagtcaggccttaattttcaatataatttaacttcagagggaaagtaaatatttcaggcatactgacactttgccagaaagcataaaattcttaaaatatatttcagatatcagaatcattgaagtattttcctccaggcaaaattgatatacttttttcttatttaacttaacattctgtaaaatgtctgttaacttaatagtatttatgaaatggttaagaatttggtaaattagtatttatttaatgttatgttgtgttctaataaaacaaaaatagacaactgttc

SEQ ID NO: 1237 - DNA, 1227 bp; single-stranded, linear
  immediate source library: GENBANK
  immediate source clone: g28850
atgggggagaaacccgggaccagggtcttcaagaagtcgagccctaactgcaagctcaccgtgtacttgggcaagcgggacttcgtagatcacctggacaaagtggaccctgtagatggcgtggtgcttgtggaccctgactacctgaaggaccgcaaagtgtttgtgaccctcacctgcgccttccgctatggccgtgaagacctggatgtgctgggcttgtccttccgcaaagacctgttcatcgccacctaccaggccttccccccggtgcccaacccaccccggccccccacccgcctgcaggaccggctgctgaggaagctgggccagcatgcccaccccttcttcttcaccataccccagaatcttccatgctccgtcacactgcagccaggcccagaggatacaggaaaggcctgcggggtagactttgagattcgagccttctgtgctaaatcactagaagagaaaagccacaaaaggaactctgtgcggctggtgatccgaaaggtgcagttcgccccggagaaacccggcccccagccttcagccgaaaccacaccccacttcctcatgtctgaccggtccctgcacctcgaggcttccctggacaaggagctgtactaccatggggagcccctcaatgtaaatgtccacgtcaccaacaactccaccaagaccgtcaagaagatcaaagtctctgtgagacagtacgccgacatctgcctcttcagcaccgcccagtacaagtgtcctgtggctcaactcgaacaagatgaccaggtatctcccagctccacattctgtaaggtgtacaccataaccccactgctcagcgacaaccgggagaagcggggtctcgccctggatgggaaactcaagcacgaggacaccaacctggcttccagcaccatcgtgaaggagggtgccaacaaggaggtgctgggaatcctggtgtcctacagggtcaaggtgaagctggtggtgtctcgaggcggggatgtctctgtggagctgccttttgttcttatgcaccccaagccccacgaccacatccccctccccagaccccagtcagccgctccggagacagatgtccctgtggacaccaacctcattgaatttgataccaactatgccacagatgatgacattgtgtttgaggactttgcccggcttcggctgaaggggatgaaggatgacgactatgatgatcaactctgc

SEQ ID NO: 1238 - DNA, 813 bp; single-stranded, linear
  immediate source library: GENBANK
  immediate source clone: g28875
catccgtggttttttggcaaaatccccagagccaaggcagaagaaatgcttagcaaacagcggcacgatggggcctttcttatccgagagagtgagagcgctcctggggacttctccctctctgtcaagtttggaaacgatgtgcagcacttcaaggtgctccgagatggagccgggaagtacttcctctgggtggtgaagttcaattctttgaatgagctggtggattatcacagatctacatctgtctccagaaaccagcagatattcctgcgggacatagaacaggtgccacagcagccgacatacgtccaggccctctttgactttgatccccaggaggatggagagctgggcttccgccggggagattttatccatgtcatggataactcagaccccaactggtggaaaggagcttgccacgggcagaccggcatgtttccccgcaattatgtcacccccgtgaaccggaacgtctaagagtcaagaagcaattatttaaagaaagtgaaaatgtaaacacatacaaagaattaaacccacaagctgcctctgacagcagcctgtgagggagtgcagaacacctggccgggtcaccctgtgaccctctcactttggttggaactttagggggtgggagggggcgttggatttaaaaatgccaaaacttacctataaattaagaagagtttttattacaaattttcactgctgctcctctttcccctcctttgtcttttttttcatccttttttctcttctgtccatcagtgcatgacgtttaaggccacgtatagtcctgctgacgcc

SEQ ID NO: 1239 - DNA, 905 bp; single-stranded, linear
  immediate source library: GENBANK
  immediate source clone: g28976
cggctgacagtcctggccctgctggctggtctgctggcgtcctcgagggccggctccagcccccttttggacatcgttggcggccggaaggcgaggccccgccagttcccgttcctggcctccattcagaatcaaggcaggcacttctgcgggggtgccctcatccatgcccgcttcgtgatgaccgcggccagctgcttccaaagccagaaccctggggttagcaccgtggtgctgggtgcctatgacctgaggcggcgggagaggcagtcccgccagacgttttccatcagcagcatgagcgagaatggctacgacccccagcagaacctgaacgacctgatgctgcttcagctggaccgtgaggccaacctcaccagcagcgtgacgatactgccactgcctctgcagaacgccacggtggaagccggcaccagatgccaggtggccggctgggggagccagcgcagtggggggcgtctctcccgttttcccaggttcgtcaacgtgactgtgacccccgaggaccagtgtcgccccaacaacgtgtgcaccggtgtgctcacccgccgcggtggcatctgcaatggggacgggggcacccccctcgtctgcgagggcctggcccacggcgtggcctccttttccctggggccctgtggccgaggccctgacttcttcacccgagtggcgctcttccgagactggatcgatggtgttctcaacaacccgggaccggggccagcctaggggggcctgtgacctcccatggagcccagcccccgccctccacacctccggcgctccgcacccacctcccacggccccgcccctgcccccgctccggccagaggggcctggctgtaataaagaagccgatctctcctctgaaaaaaaaaaaaaaa

SEQ ID NO: 1240 - DNA, 902 bp; single-stranded, linear
  immediate source library: GENBANK
  immediate source clone: g291863
ctccggggcccatggggctcctgaccattctgaagaagatgaatcagaaagagcgggagctgcgactgctcatgcttggcctggacaatgctggaaagacaaccatcctgaagaagttcaatggggaggacatcgacaccatctccccaacgctgggcttcaacatcaagaccctggagcaccgaggattcaagctgaacatctgggatgtgggtggccagaagtccctgcggtcctactggcggaactactttgagagcaccgatggcctcatctgggtagtggacagcgcagaccgccagcgcatgcaggactgccagcgggagctccagagcctgctggtggaggagcgcctggccggagcaaccctcctcatctttgctaataagcaggacctgcctggagcactgtcctctaacgccatccgcgaggccctggagctggactccatccgcagccaccactggtgcatccagggctgcagcgccgtcaccggggagaacctgctgccgggcatcgactggctcctggatgacatttccagccgcattttcacagctgactgaaccactccagatgccccccacctagcagtccaggtccctcaaccttcaccaaacactacccatggggggttgggagtcagccggccaaactaacactccccctcctccaccccagcctgctgctgctactgctgccgctgctgctctgtggccacccggctcccatggcgggaggctgtgccctggctgtctctctggctcctgacctggcctttggctaccataccaagaagagagggctgggcggggaggagctgctactgctgctaccgaggctgtgggcctcatccttcactcagttgtgaaataaaccgctccttgccccgaaaaaaaaaa

SEQ ID NO: 1241 - DNA, 1662 bp; single-stranded, linear
  immediate source library: GENBANK
  immediate source clone: g291897
caagagctccagcaaagactttcactgtagcttgacttgacctgagattaactagggaatcttgagaataaagatgagctctgaaaattgtttcgtagcagagaacagctctttgcatccggagagtggacaagaaaatgatgccaccagtccccatttctcaacacgtcatgaagggtccttccaagttcctgtcctgtgtgctgtaatgaatgtggtcttcatcaccattttaatcatagctctcattgccttatcagtgggccaatacaattgtccaggccaatacacattctcaatgccatcagacagccatgtttcttcatgctctgaggactgggttggctaccagaggaaatgctactttatttctactgtgaagaggagctggacttcagcccaaaatgcttgttctgaacatggtgctactcttgctgtcattgattctgaaaaggacatgaactttctaaaacgatacgcaggtagagaggaacactgggttggactgaaaaaggaacctggtcacccatggaagtggtcaaatggcaaagaatttaacaactggttcaacgttacagggtctgacaagtgtgtttttctgaaaaacacagaggtcagcagcatggaatgtgagaagaatttatactggatatgtaacaaaccttacaaataataaggaaacgtgttcacttattgactattatagaatggaactcaaggaaatctgtgtcagtggatgctgctctgtggtccgaagtcttccatagagactttgtgaaaaaaaattttatagtgtcttgggaattttcttccaaacagaactatggaaaaaaaggaagaaattccaggaaaatctgcacttgtggcttttattgccatgagctagaagcatcacaggttgaccaataaccatgcccaagaatgagaagaatgactatgcaacctttggatgcactttatattattttgaatccagaaataatgaaataactaggcgtggacttactattaattgctgaatgactaccaacagtgagagcccttcatgcatttgcactattggaaggagttagatgttggtactagatactgaatgtaaacaaaggaattatggctggtaacatagtttttagtctaattgaatcccttaaactcagggagcatttataaatggcaaatgcttatgaaactaagatttgtaatatttctctctttttagagaaatttgccaatttactttgttatttttccccaaaaagaatgggatgatcgtgtatttatttttttacttcctcagctgtagacaggtccttttcgatggtacatatttctttgcctttataatcttttatacagtgtcttacagagaaaagacataagcaaagactatgaggaatatttgcaagacatagaatagtgttggaaaatgtgcaatatgtgatgtggcaaatctctattaggaaatattctgtaatcttcagacctagaataatactagtcttataataggtttgtgactttcctaaatcaattctattacgtgcaatacttcaatacttcatttaaaatatttttatgtgcaataaaatgtatttgtttgtattttgtgttcagtacaattataagctgtttttatatatgtgaaataaaagtagaataaac

SEQ ID NO: 1242 - DNA, 672 bp; single-stranded, linear
  immediate source library: GENBANK
  immediate source clone: g291928
atggcttgccttggatttcagcggcacaaggctcagctgaacctggctgccaggacctggccctgcactctcctgttttttcttctcttcatccctgtcttctgcaaagcaatgcacgtggcccagcctgctgtggtactggccagcagccgaggcatcgccagctttgtgtgtgagtatgcatctccaggcaaagccactgaggtccgggtgacagtgcttcggcaggctgacagccaggtgactgaagtctgtgcggcaacctacatgacggggaatgagttgaccttcctagatgattccatctgcacgggcacctccagtggaaatcaagtgaacctcactatccaaggactgagggccatggacacgggactctacatctgcaaggtggagctcatgtacccaccgccatactacctgggcataggcaacggaacccagatttatgtaattgatccagaaccgtgcccagattctgacttcctcctctggatccttgcagcagttagttcggggttgtttttttatagctttctcctcacagctgtttctttgagcaaaatgctaaagaaaagaagccctcttacaacaggggtctatgtgaaaatgcccccaacagagccagaatgtgaaaagcaatttcagccttattttattcccatcaattga

SEQ ID NO: 1243 - DNA, 1345 bp; single-stranded, linear
  immediate source library: GENBANK
  immediate source clone: g292054
aaaacagccggggctccagcgggagaacgataatgcaaagtgctatgttcttggctgttcaacacgactgcagacccatggacaagagcgcaggcagtggccacaagagcgaggagaagcgagaaaagatgaaacggacccttttaaaagattggaagacccgtttgagctacttcttacaaaattcctctactcctgggaagcccaaaaccggcaaaaaaagcaaacagcaagctttcatcaagccttctcctgaggaagcacagctgtggtcagaagcatttgacgagctgctagccagcaaatatggtcttgctgcattcagggcttttttaaagtcggaattctgtgaagaaaatattgaattctggctggcctgtgaagacttcaaaaaaaccaaatcaccccaaaagctgtcctcaaaagcaaggaaaatatatactgacttcatagaaaaggaagctccaaaagagataaacatagattttcaaaccaaaactctgattgcccagaatatacaagaagctacaagtggctgctttacaactgcccagaaaagggtatacagcttgatggagaacaactcttatcctcgtttcttggagtcagaattctaccaggacttgtgtaaaaagccacaaatcaccacagagcctcatgctacatgaaatgtaaaagggagcccagaaatggaggacatttcattctttttcctgaggggaaggactgtgacctgccataaagactgaccttgaattcagcctgggtgttcaggaaacatcactcagaactattgattcaaagttgggtagtgaatcaggaagccagtaactgactaggagaagctggtatcagaacagcttccctcactgtgtacagaacgcaagaagggaataggtggtctgaacgtggtgtctcactctgaaaagcaggaatgtaagatgatgaaagagacaatgtaatactgttggtccaaaagcatttaaaatcaatagatctgggattatgtggccttaggtagctggttgtacatctttccctaaatcgatccatgttaccacatagtagttttagtttaggattcagtaacagtgaagtgtttactatgtgcaagggtattgaagttcttatgaccacagatcatcagtactgttgtctcatgtaatgctaaaactgaaatggtccgtgtttgcattgttaaaaatgatgtgtgaaatagaatgagtgctatggtgttgaaaactgcagtgtccgttatgagtgccaaaaatctgtcttgaaggcagctacactttgaagtggtctttgaatacttttaataaatttattttgataaataatattg

SEQ ID NO: 1244 - DNA, 2391 bp; single-stranded, linear
  immediate source library: GENBANK
  immediate source clone: g292159
tgcggccgcacctgcaggcgcagagtaggtatggaagatccctcgagatccattgtgctctaaagccgccgggggtccgtgtcctgtctcggttggccggacccgggcccgagcccgagcagtagccggcgccatgtcggtggtgggcatagacctgggcttccagagctgctacgtcgctgtggcccgcgccggcggcatcgagactatcgctaatgagtatagcgaccgctgcacgccggcttgcatttcttttggtcctaagaatcgttcaattggagcagcagctaaaagccaggtaatttctaatgcaaagaacacagtccaaggatttaaaagattccatggccgagcattctctgatccatttgtggaggcagaaaaatctaaccttgcatatgatattgtgcagtggcctacaggattaacaggtataaaggtgacatatatggaggaagagcgaaattttaccactgagcaagtgactgccatgcttttgtccaaactgaaggagacagccgaaagtgttcttaagaagcctgtagttgactgtgttgtttcggttccttgtttctatactgatgcagaaagacgatcagtgatggatgcaacacagattgctggtcttaattgcttgcgattaatgaatgaaaccactgcagttgctcttgcatatggaatctataagcaggatcttcctcgcttagaagagaaaccaagaaatgtagtttttgtagacatgggccactctgcttatcaagtttctgtatgtgcatttaatagaggaaaactgaaagttctggccactgcatttgacacgacattgggaggtagaaaatttgatgaagtgttagtaaatcacttctgtgaagaatttgggaagaaatacaagctagacattaagtccaaaatccgtgcattattacgactctctcaggagtgtgagaaactcaagaaattgatgagtgcaaatgcttcagatctccctttgagcattgaatgttttatgaatgatgttgatgtatctggaactatgaatagaggcaaatttctggagatgtgcaatgatctcttagctagagtggagccaccacttcgtagtgttttggaacaaaccaagttaaagaaagaagatatttatgcagtggagatagttggtggtgctacacgaatccctgcggtaaaagagaagatcagcaaatttttcggtaaagaacttagtacaacattaaatgctgatgaagctgtcactcgaggctgtgcattgcagtgtgccatcttatcgcctgctttcaaagtcagagaattttctatcactgatgtagtaccatatccaatatctctgagatggaattctccagctgaagaagggtcaagtgactgtgaagtcttttccaaaaatcatgctgctcctttctctaaagttcttacattttatagaaaggaacctttcactcttgaggcctactacagctctcctcaggatttgccctatccagatcctgctatagctcagttttcagttcagaaagtcactcctcagtctgatggctccagttcaaaagtgaaagtcaaagttcgagtaaatgtccatggcattttcagtgtgtccagtgcatctttagtggaggttcacaagtctgaggaaaatgaggagccaatggaaacagatcagaatgcaaaggaggaagagaagatgcaagtggaccaggaggaaccacatgttgaagagcaacagcagcagacaccagcagaaaataaggcagagtctgaagaaatggagacctctcaagctggatccaaggataaaaagatggaccaaccaccccaatgccaagaaggcaaaagtgaagaccagtactgtggacctgccaatcgagaatcagctatatggcagatagacagagagatgctcaacttgtacattgaaaatgagggtaagatgatcatgcaggataaactggagaaggagcggaatgatgctaagaacgcagtggaggaatatgtgtatgaaatgagagacaagcttagtggtgaatatgagaagtttgtgagtgaagatgatcgtaacagttttactttgaaactggaagatactgaaaattggttgtatgaggatggagaagaccagccaaagcaagtttatgttgataagttggctgaattaaaaaatctaggtcaacctattaagatacgtttccaggaatctgaagaacgaccaaattatttgaagaactagagaacttagggaaacagatccaacagtatatgaaaataatcagctcctttcaaaaacaaggaggaccaggtatgatcatttggatgctgctgacatgacaaaggtagaaaaaagcacaaatgaagcaatggagtggatggaagtcacaccaa

SEQ ID NO: 1245 - DNA, 894 bp; single-stranded, linear
  immediate source library: GENBANK
  immediate source clone: g292276
cagtctcaatgggggcactggggctggagggcaggggtgggaggctccaggggaggggttccctcctgctagctgtggcaggagccacttctctggtgaccttgttgctggcggtgcctatcactgtcctggctgtgctggccttagtgccccaggatcagggaggactggtaacggagacggccgaccccggggcacaggcccagcaaggactggggtttcagaagctgccagaggaggagccagaaacagatctcagccccgggctcccagctgcccacctcataggcgctccgctgaaggggcaggggctaggctgggagacgacgaaggaacaggcgtttctgacgagcgggacgcagttctcggacgccgaggggctggcgctcccgcaggacggcctctattacctctactgtctcgtcggctaccggggccgggcgccccctggcggcggggacccccagggccgctcggtcacgctgcgcagctctctgtaccgggcggggggcgcctacgggccgggcactcccgagctgctgctcgagggcgccgagacggtgactccagtgctggacccggccaggagacaagggtacgggcctctctggtacacgagcgtggggttcggcggcctggtgcagctccggaggggcgagagggtgtacgtcaacatcagtcaccccgatatggtggacttcgcgagagggaagaccttctttggggccgtgatggtggggtgagggaatatgagtgcgtggtgcgagtgcgtgaatattgggggcccggacgcccaggaccccatggcagtgggaaaaatgtaggagactgtttggaaattgattttgaacctgatgaaaataaagaatggaaagcttcagtgctgccgataaa

SEQ ID NO: 1246 - DNA, 1796 bp; single-stranded, linear
  immediate source library: GENBANK
  immediate source clone: g292414
ctagatcaccatggcgactggacagaagttgatgagagctgttagagtttttgaatttggtgggccagaagtcctgaaattgcgatcagatattgcagtaccgattccaaaagaccatcaggttctaatcaaggtccatgcatgtggtgtcaaccccgtggagacatacattcgctctggtacttatagtagaaaaccactcttaccctatactcctggctcagatgtggctggggtgatagaagctgttggagataatgcatctgctttcaagaaaggtgacagagttttcactagcagcacgatctctgggggttatgcagagtatgctcttgcagcagaccacactgtttacaaactacctgaaaaactggactttaaacaaggagctgccatcggcattccatattttactgcttatcgagctctgatccacagtgcctgtgtgaaagctggagagagtgttctggttcatggggcaagtggaggagttggattagcagcatgccaaattgctagagcttatggcttaaagattttgggcactgctggtactgaggaaggacaaaagattgttttgcaaaatggagcccatgaagtgttcaatcacagagaagtgaattacattgataaaattaagaagtatgttggtgagaaaggaattgatataattattgaaatgttagctaatgtaaatcttagtaaagacttgagtcttctgtcacatggaggacgagtgatagttgttggcagcagaggtactattgaaataaacccacgagacaccatggcaaaggagtcgagtataattggagttactctcttttcctcaaccaaggaggaatttcagcaatatgcagcagcccttcaagctggaatggaaattggctggttgaaacctgtgataggttctcaatatccattggagaaggtggccgaggctcatgaaaatatcattcatggtagtggggctactggaaaaatgattcttctcttatgatgattaattctttcatggatttcctatgtaattagaggtactgtctttcccccagttgtacttaccctatcttttctttaattaacattcgattccatgagcttcttatgtgaaaaaataagatttttctttagagagcagaagcagaagagtaaaatttattgtatagctagcaatatttttttatgccatctgtctcaaatcaaagagtcatcatagtaggaaataacatgttagttgtcatttggcatgagtgtgcattccagtaattcttaattgatatttgattaattccatacctttgattaaaacatgctagttcaaaataagactgctcagtttccaagggttttcaagcctacttacctttataaaggttctctagtctctgattagccatgactgtattggactttgaacattttctgaactaaaaacctctattctaaactaatctcatttggatgtgtaagtcttttgtaaaggcaagaataaataatatccaggacaatttattagttttctcagtattttcccaaatattagaatatttacttcattattggttggctgccaatgaccccatatgttctgtgagaatagtagctttatctttgatataatacatagtctccaaataggtaatacttcgcaattgattagattttcagagtagatttagagttatctgtttttctggtgagggtcaaatatttttgttaattaagctcacaaatttgataaattaagaattatctgcatttgtctggtaacataataatgtgtaataaagtct

SEQ ID NO: 1247 - DNA, 2156 bp; single-stranded, linear
  immediate source library: GENBANK
  immediate source clone: g292416
ggcacgagcccagaaacaaagacttcacggacaaagtcccttggaaccagagagaagccgggatggaaactccaaacaccacagaggactatgacacgaccacagagtttgactatggggatgcaactccgtgccagaaggtgaacgagagggcctttggggcccaactgctgccccctctgtactccttggtatttgtcattggcctggttggaaacatcctggtggtcctggtccttgtgcaatacaagaggctaaaaaacatgaccagcatctacctcctgaacctggccatttctgacctgctcttcctgttcacgcttcccttctggatcgactacaagttgaaggatgactgggtttttggtgatgccatgtgtaagatcctctctgggttttattacacaggcttgtacagcgagatctttttcatcatcctgctgacgattgacaggtacctggccatcgtccacgccgtgtttgccttgcgggcacggaccgtcacttttggtgtcatcaccagcatcatcatttgggccctggccatcttggcttccatgccaggcttatacttttccaagacccaatgggaattcactcaccacacctgcagccttcactttcctcacgaaagcctacgagagtggaagctgtttcaggctctgaaactgaacctctttgggctggtattgcctttgttggtcatgatcatctgctacacagggattataaagattctgctaagacgaccaaatgagaagaaatccaaagctgtccgtttgatttttgtcatcatgatcatcttttttctcttttggaccccctacaatttgactatacttatttctgttttccaagacttcctgttcacccatgagtgtgagcagagcagacatttggacctggctgtgcaagtgacggaggtgatcgcctacacgcactgctgtgtcaacccagtgatctacgccttcgttggtgagaggttccggaagtacctgcggcagttgttccacaggcgtgtggctgtgcacctggttaaatggctccccttcctctccgtggacaggctggagagggtcagctccacatctccctccacaggggagcatgaactctctgctgggttctgactcagaccataggaggccaacccaaaataagcaggcgtgacctgccaggcacactgagccagcagcctggctctcccagccaggttctgactcttggcacagcatggagtcacagccacttgggatagagagggaatgtaatggtggcctggggcttctgaggcttctggggcttcagtcttttccatgaacttctcccctggtagaaagaagatgaatgagcaaaaccaaatattccagagactgggactaagtgtaccagagaagggcttggactcaagcaagatttcagatttgtgaccattagcatttgtcaacaaagtcacccacttcccactattgcttgcacaaaccaattaaacccagtagtggtgactgtgggctccattcaaagtgagctcctaagccatgggagacactgatgtatgaggaatttctgttcttccatcacctccccccccccgccaccctcccactgccaagaacttggaaatagtgatttccacagtgactccactctgagtcccagagccaatcagtagccagcatctgcctccccttcactcccaccgcaggatttgggctcttggaatcctggggaacatagaactcatgacggaagagttgagacctaacgagaaatagaaatgggggaactactgctggcagtggaactaagaaagcccttaggaagaatttttatatccactaaaatcaaacaattcagggagtgggctaagcacgggccatatgaataacatggtgtgcttcttaaaatagccataaaggggagggactcatcatttccatttacccttcttttctgactatttttcagaatctctcttcttttcaagttgggtgatatgttggtagattctaatggctttattgcagcgattaataacaggcaaaaggaagcagggttggtttcccttctttttgttcttcatctaagccttctggttttatgggtcagagttccgactgccatcttggacttgtcagcaaaaaaaaaaaaaaaaa

SEQ ID NO: 1248 - DNA, 1320 bp; single-stranded, linear
  immediate source library: GENBANK
  immediate source clone: g292509
tgcgccaggatggagttcgtgaaatgccttggccaccccgaagagttctacaacctggtgcgcttccggatcgggggcaagcggaaggtgatgcccaagatggaccaggactcgctcagcagcagcctgaaaacttgctacaagtatctcaatcagaccagtcgcagtttcgcagctgttatccaggcgctggatggggaaatgcgcaacgcagtgtgcatattttatctggttctccgagctctggacacactggaagatgacatgaccatcagtgtggaaaagaaggtcccgctgttacacaactttcactctttcctttaccaaccagactggcggttcatggagagcaaggagaaggatcgccaggtgctggaggacttcccaacgatctcccttgagtttagaaatctggctgagaaataccaaacagtgattgccgacatttgccggagaatgggcattgggatggcagagtttttggataagcatgtgacctctgaacaggagtgggacaagtactgccactatgttgctgggctggtcggaattggcctttcccgtcttttctcagcctcagagtttgaagaccccttagttggtgaagatacagaacgtgccaactctatgggcctgtttctgcagaaaacaaacatcatccgtgactatctggaagaccagcaaggaggaagagagttctggcctcaagaggtttggagcaggtatgttaagaagttaggggattttgctaagccggagaatattgacttggccgtgcagtgcctgaatgaacttataaccaatgcactgcaccacatcccagatgtcatcacctacctttcgagactcagaaaccagagtgtgtttaacttctgcgctattccacaggtgatggccattgccactttggctgcctgttataataaccagcaggtgttcaaaggggcagtgaagattcggaaagggcaagcagtgaccctgatgatggatgccaccaatatgccagctgtcaaagccatcatatatcagtatatggaagagatttatcatagaatccccgactcagacccatcttctagcaaaacaaggcagatcatctccaccatccggacgcagaatcttcccaactgtcagctgatttcccgaagccactactcccccatctacctgtcgtttgtcatgcttttggctgccctgagctggcagtacctgaccactctctcccaggtaacagaagactatgttcagactggagaacactgatcccaaatttgtccatagctgaagtccaccataaagtggatttactttttttcttta

SEQ ID NO: 1249 - DNA, 2305 bp; single-stranded, linear
  immediate source library: GENBANK
  immediate source clone: g29370
gaattcatgccgcgtttctgtgttggacaggggtgactttgtgccggatggcttctgtgtgagagcgcgcgcgagtgtgcatgtcggtgagctgggagggtgtgtctcagtgtctatggctgtggttcggtataagtctaagcatgtctgccagggtgtatttgtgcctgtatgtgcgtgcctcggtgggcactctcgtttccttccgaatgtggggcagtgccggtgtgctgccctctgccttgagacctcaagccgcgcaggcgcccagggcaggcaggtagcggccacagaagagccaaaagctcccgggttggctggtaagcacaccacctccagctttagccctctggggccagccagggtagccgggaagcagtggtggcccgccctccagggagcagttgggccccgcccgggccagcctcaggagaaggagggcgaggggaggggagggaaaggggaggagtgcctcgccccttcgcggctgccggcgtgccattggccgaaagttcccgtacgtcacggcgagggcagttcccctaaagtcctgtgcacataacgggcagaacgcactgcgaagcggcttcttcagagcacgggctggaactggcaggcaccgcgagcccctagcacccgacaagctgagtgtgcaggacgagtccccaccacacccacaccacagccgctgaatgaggcttccaggcgtccgctcgcggcccgcagagccccgccgtgggtccgcctgctgaggcgcccccagccagtgcgcttacctgccagactgcgcgccatggggcaacccgggaacggcagcgccttcttgctggcacccaatagaagccatgcgccggaccacgacgtcacgcagcaaagggacgaggtgtgggtggtgggcatgggcatcgtcatgtctctcatcgtcctggccatcgtgtttggcaatgtgctggtcatcacagccattgccaagttcgagcgtctgcagacggtcaccaactacttcatcacttcactggcctgtgctgatctggtcatgggcctggcagtggtgccctttggggccgcccatattcttatgaaaatgtggacttttggcaacttctggtgcgagttttggacttccattgatgtgctgtgcgtcacggccagcattgagaccctgtgcgtgatcgcagtggatcgctactttgccattacttcacctttcaagtaccagagcctgctgaccaagaataaggcccgggtgatcattctgatggtgtggattgtgtcaggccttacctccttcttgcccattcagatgcactggtaccgggccacccaccaggaagccatcaactgctatgccaatgagacctgctgtgacttcttcacgaaccaagcctatgccattgcctcttccatcgtgtccttctacgttcccctggtgatcatggtcttcgtctactccagggtctttcaggaggccaaaaggcagctccagaagattgacaaatctgagggccgcttccatgtccagaaccttagccaggtggagcaggatgggcggacggggcatggactccgcagatcttccaagttctgcttgaaggagcacaaagccctcaagacgttaggcatcatcatgggcactttcaccctctgctggctgcccttcttcatcgttaacattgtgcatgtgatccaggataacctcatccgtaaggaagtttacatcctcctaaattggataggctatgtcaattctggtttcaatccccttatctactgccggagcccagatttcaggattgccttccaggagcttctgtgcctgcgcaggtcttctttgaaggcctatgggaatggctactccagcaacggcaacacaggggagcagagtggatatcacgtggaacaggagaaagaaaataaactgctgtgtgaagacctcccaggcacggaagactttgtgggccatcaaggtactgtgcctagcgataacattgattcacaagggaggaattgtagtacaaatgactcactgctgtaaagcagtttttctacttttaaagacccccccccccaacagaacactaaacagactatttaacttgagggtaataaacttagaataaaattgtaaaattgtatagagatatgcagaaggaagggcatccttctgccttttttatttttttaagctgtaaaaagagagaaaacttatttgagtgattatttgttatttgtacagttcagttcctctttgcatggaatttgtaagtttatgtctaaagagctttagtcctagaggacctgagtc

SEQ ID NO: 1250 - DNA, 1540 bp; single-stranded, linear
  immediate source library: GENBANK
  immediate source clone: g29388
tggaagctctgcatcccttctcccataccttgctctacacatctcttcatgtgtatcctctgcagcatccttgatgataaaccagtaaatatgagttttgatcatcctgagaaaatgggccttggcctgcagacccaataaaacttcctcgaatggataatagtgcaaattcctgtggacctgaagggcctgccgcccctgtgggggattagccagaagcacgcttgttttcccgctcagaacaaagtgacttccctgaacacatcttcattatgattcacaccaacctgaagaaaaagttcagctgctgcgtcctggtctttcttctgtttgcagtcatctgtgtgtggttggaaaagaagaaagggagttactatgattcctttaaattgcaaaccaaggaattccaggtgttaaagagtctggggaaattggccatggggtctgattcccagtctgtatcctcaagcagcacccaggaccccacaggccgccagaccctcggcagtctcagaggcctagccaaggccaaaccagaggcctccttccaggtgtggaacaaggacagctcttccaaaaaccttatccctaggctgcaaaagatctggaagaattacctaagcatgaacaagtacaaagtgtcctacaaggggccaggaccaggcatcaagttcagtgcagaggccctgcgctgccaccctcgggaccatgtgaatgtatccatggtagaggtcacagattttcccttcaatacctctgaatgggagggttatctgcccaaggagagcattaggaccaaggctgggccttggggcaggtgtgctgttgtgtcgtcagcgggatctctgaagtcctcccaactaggcagagaaatcgatgatcatgacgcagtcctgaggtttaatggggcacccacagccaacttccaacaagatgtgggcacaaaaactaccattcgcctgatgaactctcagttggttaccacagagaagcgcttcctcaaagacagtttgtacaatgaaggaatcctaattgtatgggacccatctgtataccactcagatatcccaaagtggtaccagaatccggattataatttctttaacaactacaagacttatcgtaagctgcaccccaatcagcccttttacatcctcaagccccagatgccttgggagctatgggacattcttcaagaaatctccccagaagagattcagccaaaccccccatcctctgggatgcttggtatcatcatcatgatgacgctgtgtgaccaggtggatatttatgagttcctcccatccaagcgcaagactgacgtgtgctactactaccagaagttcttcgatagtgcctgcacgatgggtgcctaccacccgctgctctatgagaagaatttggtgaagcatctcaaccagggcacagatgaggacatctacctgcttggaaaagccacactgcctggcttccggaccattcactgctaagcacaggctcctcactcttctccatcaggcattaaatgaatggtctcttg

SEQ ID NO: 1251 - DNA, 2627 bp; single-stranded, linear
  immediate source library: GENBANK
  immediate source clone: g29471
gctgacgccttcgagcgcggcccggggcccggagcggccggagcagcccgggtcctgaccccggcccggctcccgctccgggctctgccggcgggcgggcgagcgcggcgcggtccgggccggggggatgtctcggcggacgcgctgcgaggatctggatgagctgcactaccaggacacagattcagatgtgccggagcagagggatagcaagtgcaaggtcaaatggacccatgaggaggacgagcagctgagggccctggtgaggcagtttggacagcaggactggaagttcctggccagccacttccctaaccgcactgaccagcaatgccagtacaggtggctgagagttttgaatccagaccttgtcaaggggccatggaccaaagaggaagaccaaaaagtcatcgagctggttaagaagtatggcacaaagcagtggacactgattgccaagcacctgaagggccggctggggaagcagtgccgtgaacgctggcacaaccacctcaaccctgaggtgaagaagtcttgctggaccgaggaggaggaccgcatcatctgcgaggcccacaaggtgctgggcaaccgctgggccgagatcgccaagatgttgccagggaggacagacaatgctgtgaagaatcactggaactctaccatcaaaaggaaggtggacacaggaggcttcttgagcgagtccaaagactgcaagcccccagtgtacttgctgctggagctcgaggacaaggacggcctccagagtgcccagcccacggaaggccagggaagtcttctgaccaactggccctccgtccctcctaccataaaggaggaggaaaacagtgaggaggaacttgcagcagccaccacatcgaaggaacaggagcccatcggtacagatctggacgcagtgcgaacaccagagcccttggaggaattcccgaagcgtgaggaccaggaaggctccccaccagaaacgagcctgccttacaagtgggtggtggaggcagctaacctcctcatccccgctgtgggttctagcctctctgaagccctggacttgatcgagtcggaccctgatgcttggtgtgacctgagtaaatttgacctccctgaggaaccatctgcagaggacagtatcaacaacagcctagtgcagctgcaagcgtcacatcagcagcaagtcctgccaccccgccagccttccgccctggtgcccagtgtgaccgagtaccgcctggatggccacaccatctcagacctgagccggagcagccggggcgagctgatccccatctcccccagcactgaagtcgggggctctggcattggcacaccgccctctgtgctcaagcggcagaggaagaggcgtgtggctctgtcccctgtcactgagaatagcaccagtctgtccttcctggattcctgtaacagcctcacgcccaagagcacacctgttaagaccctgcccttctcgccctcccagtttctgaacttctggaacaaacaggacacattggagctggagagcccctcgctgacatccaccccagtgtgcagccagaaggtggtggtcaccacaccactgcaccgggacaagacacccctgcaccagaaacatgctgcgtttgtaaccccagatcagaagtactccatggacaacactccccacacgccaaccccgttcaagaacgccctggagaagtacggacccctgaagcccctgccacagaccccgcacctggaggaggacttgaaggaggtgctgcgttctgaggctggcatcgaactcatcatcgaggacgacatcaggcccgagaagcagaagaggaagcctgggctgcggcggagccccatcaagaaagtccggaagtctctggctcttgacattgtggatgaggatgtgaagctgatgatgtccacactgcccaagtctctatccttgccgacaactgccccttcaaactcttccagcctcaccctgtcaggtatcaaagaagacaacagcttgctcaaccagggcttcttgcaggccaagcccgagaaggcagcagtggcccagaagccccgaagccacttcacgacacctgcccctatgtccagtgcctggaagacggtggcctgcggggggaccagggaccagcttttcatgcaggagaaagcccggcagctcctgggccgcctgaagcccagccacacatctcggaccctcatcttgtcctgaggtgttgagggtgtcacgagcccattctcatgtttacaggggttgtgggggcagagggggtctgtgaatctgagagtcattcaggtgacctcctgcagggagccttctgccaccagcccctccccagactctcaggtggaggcaacagggccatgtgctgccctgttgccgagcccagctgtgggcggctcctggtgctaacaacaaagttccacttccaggtctgcctggttccctccccaaggccacagggagctccgtcagcttctcccaagcccacgtcaggcctggcctcatctcagaccctgcttaggatgggggatgtggccaggggtgctcctgtgctcaccctctcttggtgcatttttttggaagaataaaattgcctctctctttg

SEQ ID NO: 1252 - DNA, 935 bp; single-stranded, linear
  immediate source library: GENBANK
  immediate source clone: g29537
ccaggcccagctcagctgcaccgggcccccagccatccctggcatcccgggtatccctgggacacctggccccgatggccaacctgggaccccagggataaaaggagagaaagggcttccagggctggctggagaccatggtgagttcggagagaagggagacccagggattcctgggaatccaggaaaagtcggccccaagggccccatgggccctaaaggtggcccaggggcccctggagccccaggccccaaaggtgaatcgggagactacaaggccacccagaaaatcgccttctctgccacaagaaccatcaacgtccccctgcgccgggaccagaccatccgcttcgaccacgtgatcaccaacatgaacaacaattatgagccccgcagtggcaagttcacctgcaaggtgcccggtctctactacttcacctaccacgccagctctcgagggaacctgtgcgtgaacctcatgcgtggccgggagcgtgcacagaaggtggtcaccttctgtgactatgcctacaacaccttccaggtcaccaccggtggcatggtcctcaagctggagcagggggagaacgtcttcctgcaggccaccgacaagaactcactactgggcatggagggtgccaacagcatcttttccgggttcctgctctttccagatatggaggcctgacctgtgggctgcttcacatccaccccggctccccctgccagcaacgctcactctacccccaacaccaccccttgcccagccaatggacacagtagggcttggtgaatgctgctgagtgaatgagtaaataaactcttcaaggccaaggaacagtggtctaattcaactctgtgtcccagcactggcacaccagaagtgccatgctcagaaatgttggttacatgaatgaatgaaccatgaatgaatg

SEQ ID NO: 1253 - DNA, 433 bp; single-stranded, linear
  immediate source library: GENBANK
  immediate source clone: g29645
tgctaccaagacagccacgaagatcctaccaaaatgaagcgcttcctcttcctcctactcaccatcagcctcctggttatggtacagatacaaactggactctcaggacaaaacgacaccagccaaaccagcagcccctcagcatccagcaacataagcggaggcattttccttttcttcgtggccaatgccataatccacctcttctgcttcagttgaggtgacacgtctcagccttagccctgtgccccctgaaacagctgccaccatcactcgcaagagaatcccctccatctttgggaggggttgatgccagacatcaccaggttgtagaagttgacaggcagtgccatgggggcaacagccaaaataggggggtaatgatgtaggggccaagcagtgcccagctgggggtcaataaagttacccttgt

SEQ ID NO: 1254 - DNA, 887 bp; single-stranded, linear
  immediate source library: GENBANK
  immediate source clone: g29744
tctttggtgacttgtccactccagtgtggcatcatgtggcagctgctcctcccaactgctctgctacttctagtttcagctggcatgcggactgaagatctcccaaaggctgtggtgttcctggagcctcaatggtacagcgtgcttgagaaggacagtgtgactctgaagtgccagggagcctactcccctgaggacaattccacacagtggtttcacaatgagagcctcatctcaagccaggcctcgagctacttcattgacgctgccacagtcaacgacagtggagagtacaggtgccagacaaacctctccaccctcagtgacccggtgcagctagaagtccatatcggctggctgttgctccaggcccctcggtgggtgttcaaggaggaagaccctattcacctgaggtgtcacagctggaagaacactgctctgcataaggtcacatatttacagaatggcaaagacaggaagtattttcatcataattctgacttccacattccaaaagccacactcaaagatagcggctcctacttctgcagggggcttgttgggagtaaaaatgtgtcttcagagactgtgaacatcaccatcactcaaggtttggcagtgtcaaccatctcatcattctctccacctgggtaccaagtctctttctgcttggtgatggtactcctttttgcagtggacacaggactatatttctctgtgaagacaaacatttgaagctcaacaagagactggaaggaccataaacttaaatggagaaaggaccctcaagacaaatgacccccatcccatgggagtaataagagcagtggcagcagcatctctgaacatttctctggatttgcaaccccatcatcctcaggcctctc

SEQ ID NO: 1255 - DNA, 1474 bp; single-stranded, linear
  immediate source library: GENBANK
  immediate source clone: g29773
aaagacaaactgcacccactgaactccgcagctagcatccaaatcagcccttgagatttgaggccttggagactcaggagttttgagagcaaaatgacaacacccagaaattcagtaaatgggactttcccggcagagccaatgaaaggccctattgctatgcaatctggtccaaaaccactcttcaggaggatgtcttcactggtgggccccacgcaaagcttcttcatgagggaatctaagactttgggggctgtccagattatgaatgggctcttccacattgccctggggggtcttctgatgatcccagcagggatctatgcacccatctgtgtgactgtgtggtaccctctctggggaggcattatgtatattatttccggatcactcctggcagcaacggagaaaaactccaggaagtgtttggtcaaaggaaaaatgataatgaattcattgagcctctttgctgccatttctggaatgattctttcaatcatggacatacttaatattaaaatttcccattttttaaaaatggagagtctgaattttattagagctcacacaccatatattaacatatacaactgtgaaccagctaatccctctgagaaaaactccccatctacccaatactgttacagcatacaatctctgttcttgggcattttgtcagtgatgctgatctttgccttcttccaggaacttgtaatagctggcatcgttgagaatgaatggaaaagaacgtgctccagacccaaatctaacatagttctcctgtcagcagaagaaaaaaaagaacagactattgaaataaaagaagaagtggttgggctaactgaaacatcttcccaaccaaagaatgaagaagacattgaaattattccaatccaagaagaggaagaagaagaaacagagacgaactttccagaacctccccaagatcaggaatcctcaccaatagaaaatgacagctctccttaagtgatttcttctgttttctgtttccttttttaaacattagtgttcatagcttccaagagacatgctgactttcatttcttgaggtactctgcacatacgcaccacatctctatctggcctttgcatggagtgaccatagctccttctctcttacattgaatgtagagaatgtagccattgtagcagcttgtgttgtcacgcttcttcttttgagcaactttcttacactgaagaaaggcagaatgagtgcttcagaatgtgatttcctactaacctgttccttggataggctttttagtatagtatttttttttgtcattttctccatcagcaaccagggagactgcacctgatggaaaagatatatgactgcttcatgacattcctaaactatcttttttttattccacatctacgtttttggtggagtccctttttatcatccttaaaacaatgatgcaaaagggctttagagcacaatggatct

SEQ ID NO: 1256 - DNA, 2116 bp; single-stranded, linear
  immediate source library: GENBANK
  immediate source clone: g29778
acgcggaaacaggcttgcacccagacacgacaccatgcatctcctcggcccctggctcctgctcctggttctagaatacttggctttctctgactcaagtaaatgggtttttgagcaccctgaaaccctctacgcctgggagggggcctgcgtctggatcccctgcacctacagagccctagatggtgacctggaaagcttcatcctgttccacaatcctgagtataacaagaacacctcgaagtttgatgggacaagactctatgaaagcacaaaggatgggaaggttccttctgagcagaaaagggtgcaattcctgggagacaagaataagaactgcacactgagtatccacccggtgcacctcaatgacagtggtcagctggggctgaggatggagtccaagactgagaaatggatggaacgaatacacctcaatgtctctgaaaggccttttccacctcatatccagctccctccagaaattcaagagtcccaggaagtcactctgacctgcttgctgaatttctcctgctatgggtatccgatccaattgcagtggctcctagagggggttccaatgaggcaggctgctgtcacctcgacctccttgaccatcaagtctgtcttcacccggagcgagctcaagttctccccacagtggagtcaccatgggaagattgtgacctgccagcttcaggatgcagatgggaagttcctctccaatgacacggtgcagctgaacgtgaagcatcctcccaagaaggtgaccacagtgattcaaaaccccatgccgattcgagaaggagacacagtgaccctttcctgtaactacaattccagtaaccccagtgttacccggtatgaatggaaaccccatggcgcctgggaggagccatcgcttggggtgctgaagatccaaaacgttggctgggacaacacaaccatcgcctgcgcagcttgtaatagttggtgctcgtgggcctcccctgtcgccctgaatgtccagtatgccccccgagacgtgagggtccggaaaatcaagcccctttccgagattcactctggaaactcggtcagcctccaatgtgacttctcaagcagccaccccaaagaagtccagttcttctgggagaaaaatggcaggcttctggggaaagaaagccagctgaattttgactccatctccccagaagatgctgggagttacagctgctgggtgaacaactccataggacagacagcgtccaaggcctggacacttgaagtgctgtatgcacccaggaggctgcgtgtgtccatgagcccgggggaccaagtgatggaggggaagagtgcaaccctgacctgtgagagcgacgccaaccctcccgtctcccactacacctggtttgactggaataaccaaagcctcccctaccacagccagaagctgagattggagccggtgaaggtccagcactcgggtgcctactggtgccaggggaccaacagtgtgggcaagggccgttcgcctctcagcaccctcaccgtctactatagcccggagaccatcggcaggcgagtggctgtgggactcgggtcctgcctcgccatcctcatcctggcaatctgtgggctcaagctccagcgacgttggaagaggacacagagccagcaggggcttcaggagaattccagcggccagagcttctttgtgaggaataaaaaggttagaagggcccccctctctgaaggcccccactccctgggatgctacaatccaatgatggaagatggcattagctacaccaccctgcgctttcccgagatgaacataccacgaactggagatgcagagtcctcagagatgcagagacctcccccggactgcgatgacacggtcacttattcagcattgcacaagcgccaagtgggcactatgagaacgtcattccagattttccagaagatgaggggattcattactcagagctgatccagtttggggtcggggagcggcctcaggcacaagaaaatgtggactatgtgatcctcaaacattgacactggatgggctgcagcagaggcactgggggcagcgggggccagggaagtccccgagttttccccagac

SEQ ID NO: 1257 - DNA, 1282 bp; single-stranded, linear
  immediate source library: GENBANK
  immediate source clone: g297787
aagccacccagcctatgcatccgctcctcaatcctctcctgttggcactgggcctcatggcgcttttgttgaccacggtcattgctctcacttgccttggcggctttgcctccccaggccctgtgcctccctctacagccctcagggagctcattgaggagctggtcaacatcacccagaaccagaaggctccgctctgcaatggcagcatggtatggagcatcaacctgacagctggcatgtactgtgcagccctggaatccctgatcaacgtgtcaggctgcagtgccatcgagaagacccagaggatgctgagcggattctgcccgcacaaggtctcagctgggcagttttccagcttgcatgtccgagacaccaaaatcgaggtggcccagtttgtaaaggacctgctcttacatttaaagaaactttttcgcgagggacggttcaactgaaacttcgaaagcatcattatttgcagagacaggacctgactattgaagttgcagattcatttttctttctgatgtcaaaaatgtcttgggtaggcgggaaggagggttagggaggggtaaaattccttagcttagacctcagcctgtgctgcccgtcttcagcctagccgacctcagccttccccttgcccagggctcagcctggtgggcctcctctgtccagggccctgagctcggtggacccagggatgacatgtccctacacccctcccctgccctagagcacactgtagcattacagtgggtgccccccttgccagacatgtggtgggacagggacccacttcacacacaggcaactgaggcagacagcagctcaggcacacttcttcttggtcttatttattattgtgtgttatttaaatgagtgtgtttgtcaccgttggggattggggaagactgtggctgctggcacttggagccaagggttcagagactcagggccccagcactaaagcagtggaccccaggagtccctggtaataagtactgtgtacagaattctgctacctcactggggtcctggggcctcggagcctcatccgaggcagggtcaggagaggggcagaacagccgctcctgtctgccagccagcagccagctctcagccaacgagtaatttattgtttttcctcgtatttaaatattaaatatgttagcaaagagttaatatatagaagggtaccttgaacactgggggaggggacattgaacaagttgtttcattgactatcaaactgaagccagaaataaagttggtgacagat

SEQ ID NO: 1258 - DNA, 1125 bp; single-stranded, linear
  immediate source library: GENBANK
  immediate source clone: g29793
gtctcccccactgtcagcacctcttctgtgtggtgagtggaccgcttaccccactaggtgaagatgtcagcccaggagagctgcctcagcctcatcaagtacttcctcttcgttttcaacctcttcttcttcgtcctcggcagcctgatcttctgcttcggcatctggatcctcatcgacaagaccagcttcgtgtcctttgtgggcttggccttcgtgcctctgcagatctggtccaaagtcctggccatctcaggaatcttcaccatgggcatcgccctcctgggttgtgtgggggccctcaaggagctccgctgcctcctgggcctgtattttgggatgctgctgctcctgtttgccacacagatcaccctgggaatcctcatctccactcagcgggcccagctggagcgaagcttgcgggacgtcgtagagaaaaccatccaaaagtacggcaccaaccccgaggagaccgcggccgaggagagctgggactatgtgcagttccagctgcgctgctgcggctggcactacccgcaggactggttccaagtcctcatcctgagaggtaacgggtcggaggcgcaccgcgtgccctgctcctgctacaacttgtcggcgaccaacgactccacaatcctagataaggtgatcttgccccagctcagcaggcttggacacctggcgcggtccagacacagtgcagacatctgcgctgtccctgcagagagccacatctaccgcgagggctgcgcgcagggcctccagaagtggctgcacaacaaccttatttccatagtgggcatttgcctgggcgtcggcctactcgagctcgggttcatgacgctctcgatattcctgtgcagaaacctggaccacgtctacaaccggctcgctcgataccgttaggccccgccctccccaaagtcccgccccgcccccgtcacgtgcgctgggcacttccctgctgcctgtaaatatttgtttaatccccagttcgcctggagccctccgccttcacattcccctggggacccacgtggctgcgtgcccctgctgctgtcacctctcccacgggacctggggctttcgtccacagcttcctgtccccatctgtcggcctac

SEQ ID NO: 1259 - DNA, 3021 bp; single-stranded, linear
  immediate source library: GENBANK
  immediate source clone: g29817
gaacagcaaagggtagagcagacctgcgccaggggcgcacaacggccgtgtccacctcccggccccaagatggtgcttcccacaggcagccacgcgtagcagccagagacagctccagacatgtggctcttcttcgggatcactggattgctgacggcagccctctcaggtcatccatctccagccccacctgaccagctcaacaccagcagtgcagagagtgagctctgggagccaggggagcggcttccggtccgtctgacaaacgggagcagcagctgcagcgggacggtggaggtgcggctcgaggcgtcctgggagcccgcgtgcggggcgctctgggacagccgcgccgccgaggccgtgtgccgagcactgggctgcggcggggcggaggccgcctctcagctcgccccgccgacccctgagctgccgcccccgcctgcagccgggaacaccagcgtagcagctaatgccactctggccggggcgcccgccctcctgtgcagcggcgccgagtggcggctctgcgaggtggtggagcacgcgtgccgcagcgacgggaggcgggcccgtgtcacctgtgcagagaaccgcgcgctgcgcctggtggacggtggcggcgcctgcgccggccgcgtggagatgctggagcatggcgagtggggatcagtgtgcgatgacacttgggacctggaggacgcccacgtggtgtgcaggcaactgggctgcggctgggcagtccaggccctgcccggcttgcacttcacgcccggccgcgggcctatccaccgggaccaggtgaactgctcgggggccgaagcttacctgtgggactgcccggggctgccaggacagcactactgcggccacaaagaggacgcgggcgtggtgtgctcagagcaccagtcctggcgcctgacagggggcgctgaccgctgcgaggggcaggtggaggtacacttccgaggggtctggaacacagtgtgtgacagtgagtggtacccatcggaggccaaggtgctctgccagtccttgggctgtggaactgcggttgagaggcccaaggggctgccccactccttgtccggcaggatgtactactcatgcaatggggaggagctcaccctctccaactgctcctggcggttcaacaactccaacctctgcagccagtcgctggcagccagggtcctctgctcagcttcccggagtttgcacaatctgtccactcccgaagtccctgcaagtgttcagacagtcactatagaatcttctgtgacagtgaaaatagagaacaaggaatctcgggagctaatgctcctcatcccctccatcgttctgggaattctcctccttggctccctcatcttcatagccttcatcctcttgagaattaaaggaaaatatgccctccccgtaatggtgaaccaccagcacctacccaccaccatcccggcagggagcaatagctatcaaccggtccccatcaccatccccaaagaaggtccaggccccgccccctgaggactcagactctggctcggactcagactatgagcactatgacttcagcgcccagcctcctgtggccctgaccaccttctacaattcccagcggcatcgggtcacagatgaggaggtccagcaaagcaggttccagatgccacccttggaggaaggacttgaagagttgcatgcctcccacatcccaactgccaaccctggacactgcattacagacccgccatccctgggccctcagtatcacccgaggagcaacagtgagtcgagcacctcttcaggggaggattactgcaatagtcccaaaagcaagctgcctccatggaacccccaggtgttttcttcagagaggagttccttcctggagcagcccccaaacttggagctggccggcacccagccagccttttcagggtcccccagccctcagcctgactccaccgacaacgatgactacgatgacatcagcgcagcctaggccggggccagccgaggctcctggggtggctctgaccctctggcctcctgctctacctactccctttcccctttcccaccctcccagctcacctccccatggagctgagaggcctcccttggagagatggaaggaaacgttataccttgtacccctcggtctccatccatcaagccaaacctgctgccacagccctcccccggccccagatagcagccccagggaggatgctgcctccaagaggtgtgagccctctgtctcggggatgaacaagcagagtctgggctacctcttgacagctggtggaggggagttggggagctggactggatgactctggaggccccttccaaacctcaagtgtccggcgctttgattgcctgagtttctgacacttcagggcccagaggtcctgcgaggggcagaactggacccccatgccagtgctgctgcaggagggcccatatactagggtctgctgagctgttgtcactgatcggtgggcgctgggggggtagggtagcacaccagctgtcccaggctttgctccgggtggtaactgcacttgggcagggaatatagccttcctgggcacaactagctgacaatgacaggttgactgtgtacccccaaccaaggagctggggcccaaggccagtcctgccccagagacactccaagtccgccaggggcacagaccagttctgcagtgactgtccctggacaatgggtctttattctgagtttcctatggtttacaaagaggccccagcccagccccaccacagatcccagagataggggcccagtctccatgggggcaaggagcatagagatgttttccaggaaggggctcagaagctgcactaggccccgagtccccatgtgtctccttgaattgatgaggatgctcctgggagggatgcgtgactatgtggtgttgcacccggggctgcaaacgtctccgtgcagcccccagagagaggcccatgggctcagaccaggctttgttgtcctgc

SEQ ID NO: 1260 - DNA, 1656 bp; single-stranded, linear
  immediate source library: GENBANK
  immediate source clone: g29819
tagacccagagaggctcagctgcactcgcccggctgggagagctgggtgtggggaacatggccgggcctccgaggctcctgctgctgcccctgcttctggcgctggctcgcggcctgcctggggccctggctgcccaaggtaagagcttcccaggctctccatggccacagctccggagctctccctgccccatgagctcagagcccccagtctgagccacagcacagcccccaggaagcgggtggggtgctgagcggcctccagtgtctgaggactcatttaagagaaggaaaaagggtggacccggtggggagtggccggggctgtccaggcagggccgctgctttgggaggaagaagcccacagtctcggaacacgaggacagcacctcccccaacaccacagccggtgcccagatctgctccatgccccgtaaggcaccgtgtctttggcgacatgtcagccctgggctgtctcagggccccaccatccccaccactgtcccctgcagggaggacattctctgtccttctggccagactgatggtgacagcccaggtcctcccagaggtgcagcagtctccccactgcacgactgtccccgtgggagcctccgtcaacatcacctgctccaccagcgggggcctgcgtgggatctacctgaggcagctcgggccacagccccaagacatcatttactacgaggacggggtggtgcccactacggacagacggttccggggccgcatcgacttctcagggtcccaggacaacctgactatcaccatgcaccgcctgcagctgtcggacactggcacctacacctgccaggccatcacggaggtcaatgtctacggctccggcaccctggtcctggtgacagaggaacagtcccaaggatggcacagatgctcggacgccccaccaagggcctctgccctccctgccccaccgacaggctccgccctccctgacccgcagacagcctctgccctccctgacccgccagcagcctctgccctccctgcggccctggcggtgatctccttcctcctcgggctgggcctgggggtggcgtgtgtgctggcgaggacacagataaagaaactgtgctcgtggcgggataagaattcggcggcatgtgtggtgtacgaggacatgtcgcacagccgctgcaacacgctgtcctcccccaaccagtaccagtgacccagtgggcccctgcacgtcccgcctgtggtccccccagcaccttccctgccccaccatgccccccaccctgccacacccctcaccctgctgtcctcccacggctgcagcagagtttgaagggcccagccgtgcccagctccaagcagacacacaggcagtggccaggccccacggtgcttctcagtggacaatgatgcctcctccgggaagccttccctgcccagcccacgccgccaccgggaggaagcctgactgtcctttggctgcatctcccgaccatggccaaggagggcttttctgtgggatgggcctggcacgcggccctctcctgtcagtgccggcccacccaccagcaggcccccaacccccaggcagcccggcagaggacgggaggagaccagtcccccacccagccgtaccagaaataaaggcttctgtgcttc

SEQ ID NO: 1261 - DNA, 657 bp; single-stranded, linear
  immediate source library: GENBANK
  immediate source clone: g298303
tccaggagctcagctatgaactccttctccacaagcgccttcggtccagttgccttctccctggggctgctcctggtgttgcctgctgccttccctgccccagtacccccaggagaagattccaaagatgtagccgccccacacagacagccactcacctcttcagaacgaattgacaaacaaattcggtacatcctcgacggcatctcagccctgagaaaggagacatgtaacaagagtaacatgtgtgaaagcagcaaagaggcactggcagaaaacaacctgaaccttccaaagatggctgaaaaagatggatgcttccaatctggattcaatgaggagacttgcctggtgaaaatcatcactggtcttttggagtttgaggtatacctagagtacctccagaacagatttgagagtagtgaggaacaagccagagctgtgcagatgagtacaaaagtcctgatccagttcctgcagaaaaaggcaaagaatctagatgcaataaccacccctgacccaaccacaaatgccagcctgctgacgaagctgcaggcacagaaccagtggctgcaggacatgacaactcatctcattctgcgcagctttaaggagttcctgcagtccagcctgagggctcttcggcaaatgtagcat

SEQ ID NO: 1262 - DNA, 1004 bp; single-stranded, linear
  immediate source library: GENBANK
  immediate source clone: g29850
gcctcgctcgggcgcccagtggtcctgccgcctggtctcacctcgccatggttcgtctgcctctgcagtgcgtcctctggggctgcttgctgaccgctgtccatccagaaccacccactgcatgcagagaaaaacagtacctaataaacagtcagtgctgttctttgtgccagccaggacagaaactggtgagtgactgcacagagttcactgaaacggaatgccttccttgcggtgaaagcgaattcctagacacctggaacagagagacacactgccaccagcacaaatactgcgaccccaacctagggcttcgggtccagcagaagggcacctcagaaacagacaccatctgcacctgtgaagaaggctggcactgtacgagtgaggcctgtgagagctgtgtcctgcaccgctcatgctcgcccggctttggggtcaagcagattgctacaggggtttctgataccatctgcgagccctgcccagtcggcttcttctccaatgtgtcatctgctttcgaaaaatgtcacccttggacaagctgtgagaccaaagacctggttgtgcaacaggcaggcacaaacaagactgatgttgtctgtggtccccaggatcggctgagagccctggtggtgatccccatcatcttcgggatcctgtttgccatcctcttggtgctggtctttatcaaaaaggtggccaagaagccaaccaataaggccccccaccccaagcaggaaccccaggagatcaattttcccgacgatcttcctggctccaacactgctgctccagtgcaggagactttacatggatgccaaccggtcacccaggaggatggcaaagagagtcgcatctcagtgcaggagagacagtgaggctgcacccacccaggagtgtggccacgtgggcaaacaggcagttggccagagagcctggtgctgctgctgcaggggtgcaggcagaagcggggagctatgcccagtcagtgccagcccctc

SEQ ID NO: 1263 - DNA, 1722 bp; single-stranded, linear
  immediate source library: GENBANK
  immediate source clone: g298664
gcgggcggttcagccatgaggctggctgtgcttttctcgggggccctgctggggctactggcagcccaggggacagggaatgactgtcctcacaaaaaatcagctactttgctgccatccttcacggtgacacccacggttacagagagcactggaacaaccagccacaggactaccaagagccacaaaaccaccactcacaggacaaccaccacaggcaccaccagccacggacccacgactgccactcacaaccccaccaccaccagccatggaaacgtcacagttcatccaacaagcaatagcactgccaccagccagggaccctcaactgccactcacagtcctgccaccactagtcatggaaatgccacggttcatccaacaagcaacagcactgccaccagcccaggattcaccagttctgcccacccagaaccacctccaccctctccgagtcctagcccaacctccaaggagaccattggagactacacgtggaccaatggttcccagccctgtgtccacctccaagcccagattcagattcgagtcatgtacacaacccagggtggaggagaggcctggggcatctctgtactgaaccccaacaaaaccaaggtccagggaagctgtgagggtgcccatccccacctgcttctctcattcccctatggacacctcagctttggattcatgcaggacctccagcagaaggttgtctacctgagctacatggcggtggagtacaatgtgtccttcccccacgcagcaaagtggacattctcggctcagaatgcatcccttcgagatctccaagcacccctggggcagagcttcagttgcagcaactcgagcatcattctttcaccagctgtccacctcgacctgctctccctgaggctccaggctgctcagctgccccacacaggggtctttgggcaaagtttctcctgccccagtgaccggtccatcttgctgcctctcatcatcggcctgatccttcttggcctcctcgccctggtgcttattgctttctgcatcatccggagacgcccatccgcctaccaggccctctgagcatttgcttcaaaccccagggcactgagggggtttggggtgtggtgggggggtacccttatttcctcgacacgccgctggctcaaagacaatgttattttccttccctttcttgaagaacaaaaagaaagccgggcatgacggctcatgcctgtaatcccagcactttgggaggctgaggcaggtggatcactggaggtcaggtctttgaggccagccctagccaacatggtgtaaacactgtctctactaaaaatacaattagccaggtgtggcggcgtaatcccatgctaacctgtaatcccagctacttgggaggctgaggcagagctgcttgaaccctggaagtggaggttgcagtgagcctgtcatcgctccactgagccaagatcgctcccactgcactccagcctgggcgacagagccagactgtctcaaataaataaatatgagataatgcagtcgggagaagggagggagagaattttattaaatgtgacgaactgcccccccccccccccccagcaggagagcagcaaaatttatgtaaatctttgacggggttttccttgctcctgccaggattaaaagtccatgagtttcttgctcaaaaaaaaaaaaaaaaaaaaaaaaaaaaaaaaa

SEQ ID NO: 1264 - DNA, 1970 bp; single-stranded, linear
  immediate source library: GENBANK
  immediate source clone: g30125
atattggagtagcaagaggctgggaagccatcacttaccttgcactgagaaagaagacaaaggccagtatgcacagctttcctccactgctgctgctgctgttctggggtgtggtgtctcacagcttcccagcgactctagaaacacaagagcaagatgtggacttagtccagaaatacctggaaaaatactacaacctgaagaatgatgggaggcaagttgaaaagcggagaaatagtggcccagtggttgaaaaattgaagcaaatgcaggaattctttgggctgaaagtgactgggaaaccagatgctgaaaccctgaaggtgatgaagcagcccagatgtggagtgcctgatgtggctcagtttgtcctcactgaggggaaccctcgctgggagcaaacacatctgacctacaggattgaaaattacacgccagatttgccaagagcagatgtggaccatgccattgagaaagccttccaactctggagtaatgtcacacctctgacattcaccaaggtctctgagggtcaagcagacatcatgatatcttttgtcaggggagatcatcgggacaactctccttttgatggacctggaggaaatcttgctcatgcttttcaaccaggcccaggtattggaggggatgctcattttgatgaagatgaaaggtggaccaacaatttcagagagtacaacttacatcgtgttgcggctcatgaactcggccattctcttggactctcccattctactgatatcggggctttgatgtaccctagctacaccttcagtggtgatgttcagctagctcaggatgacattgatggcatccaagccatatatggacgttcccaaaatcctgtccagcccatcggcccacaaaccccaaaagcatgtgacagtaagctaacctttgatgctataactacgattcggggagaagtgatgttctttaaagacagattctacatgcgcacaaatcccttctacccggaagttgagctcaatttcatttctgttttctggccacaactgccaaatgggcttgaagctgcttacgaatttgccgacagagatgaagtccggtttttcaaagggaataagtactgggctgttcagggacagaatgtgctacacggataccccaaggacatctacagctcctttggcttccctagaactgtgaagcatatcgatgctgctctttctgaggaaaacactggaaaaacctacttctttgttgctaacaaatactggaggtatgatgaatataaacgatctatggatccaggttatcccaaaatgatagcacatgactttcctggaattggccacaaagttgatgcagttttcatgaaagatggatttttctatttctttcatggaacaagacaatacaaatttgatcctaaaacgaagagaattttgactctccagaaagctaatagctggttcaactgcaggaaaaattgaacattactaatttgaatggaaaacacatggtgtgagtccaaagaaggtgttttcctgaagaactgtctattttctcagtcatttttaacctctagagtcactgatacacagaatataatcttatttatacctcagtttgcatatttttttactatttagaatgtagccctttttgtactgatataatttagttccacaaatggtgggtacaaaaagtcaagtttgtggcttatggattcatataggccagagttgcaaagatcttttccagagtatgcaactctgacgttgatcccagagagcagcttcagtgacaaacatatcctttcaagacagaaagagacaggagacatgagtctttgccggaggaaaagcagctcaagaacacatgtgcagtcactggtgtcaccctggataggcaagggataactcttctaacacaaaataagtgttttatgtttggaataaagtcaaccttgtttctactgtttt

SEQ ID NO: 1265 - DNA, 6951 bp; single-stranded, linear
  immediate source library: GENBANK
  immediate source clone: g30185
cgtggtttgtagatgtgcttggggagaatgggggcctcttctccaagaagcccggagcctgtcgggccgccggcgcccggtctccccttctgctgcggaggatccctgctggcggttgtggtgctgcttgcgctgccggtggcctggggtcaatgcaatgccccagaatggcttccatttgccaggcctaccaacctaactgatgagtttgagtttcccattgggacatatctgaactatgaatgccgccctggttattccggaagaccgttttctatcatctgcctaaaaaactcagtctggactggtgctaaggacaggtgcagacgtaaatcatgtcgtaatcctccagatcctgtgaatggcatggtgcatgtgatcaaaggcatccagttcggatcccaaattaaatattcttgtactaaaggataccgactcattggttcctcgtctgccacatgcatcatctcaggtgatactgtcatttgggataatgaaacacctatttgtgacagaattccttgtgggctaccccccaccatcaccaatggagatttcattagcaccaacagagagaattttcactatggatcagtggtgacctaccgctgcaatcctggaagcggagggagaaaggtgtttgagcttgtgggtgagccctccatatactgcaccagcaatgacgatcaagtgggcatctggagcggccccgcccctcagtgcattatacctaacaaatgcacgcctccaaatgtggaaaatggaatattggtatctgacaacagaagcttattttccttaaatgaagttgtggagtttaggtgtcagcctggctttgtcatgaaaggaccccgccgtgtgaagtgccaggccctgaacaaatgggagccggagctaccaagctgctccagggtatgtcagccacctccagatgtcctgcatgctgagcgtacccaaagggacaaggacaacttttcacctgggcaggaagtgttctacagctgtgagcccggctacgacctcagaggggctgcgtctatgcgctgcacaccccagggagactggagccctgcagcccccacatgtgaagtgaaatcctgtgatgacttcatgggccaacttcttaatggccgtgtgctatttccagtaaatctccagcttggagcaaaagtggattttgtttgtgatgaaggatttcaattaaaaggcagctctgctagttactgtgtcttggctggaatggaaagcctttggaatagcagtgttccagtgtgtgaacaaatcttttgtccaagtcctccagttattcctaatgggagacacacaggaaaacctctggaagtctttccctttggaaaagcagtaaattacacatgcgacccccacccagacagagggacgagcttcgacctcattggagagagcaccatccgctgcacaagtgaccctcaagggaatggggtttggagcagccctgcccctcgctgtggaattctgggtcactgtcaagccccagatcattttctgtttgccaagttgaaaacccaaaccaatgcatctgactttcccattgggacatctttaaagtacgaatgccgtcctgagtactacgggaggccattctctatcacatgtctagataacctggtctggtcaagtcccaaagatgtctgtaaacgtaaatcatgtaaaactcctccagatccagtgaatggcatggtgcatgtgatcacagacatccaggttggatccagaatcaactattcttgtactacagggcaccgactcattggtcactcatctgctgaatgtatcctctcgggcaatgctgcccattggagcacgaagccgccaatttgtcaacgaattccttgtgggctaccccccaccatcgccaatggagatttcattagcaccaacagagagaattttcactatggatcagtggtgacctaccgctgcaatcctggaagcggagggagaaaggtgtttgagcttgtgggtgagccctccatatactgcaccagcaatgacgatcaagtgggcatctggagcggcccggcccctcagtgcattatacctaacaaatgcacgcctccaaatgtggaaaatggaatattggtatctgacaacagaagcttattttccttaaatgaagttgtggagtttaggtgtcagcctggctttgtcatgaaaggaccccgccgtgtgaagtgccaggccctgaacaaatgggagccggagctaccaagctgctccagggtatgtcagccacctccagatgtcctgcatgctgagcgtacccaaagggacaaggacaacttttcacccgggcaggaagtgttctacagctgtgagcccggctatgacctcagaggggctgcgtctatgcgctgcacaccccagggagactggagccctgcagcccccacatgtgaagtgaaatcctgtgatgacttcatgggccaacttcttaatggccgtgtgctatttccagtaaatctccagcttggagcaaaagtggattttgtttgtgatgaaggatttcaattaaaaggcagctctgctagttattgtgtcttggctggaatggaaagcctttggaatagcagtgttccagtgtgtgaacaaatcttttgtccaagtcctccagttattcctaatgggagacacacaggaaaacctctggaagtctttccctttggaaaagcagtaaattacacatgcgacccccacccagacagagggacgagcttcgacctcattggagagagcaccatccgctgcacaagtgaccctcaagggaatggggtttggagcagccctgcccctcgctgtggaattctgggtcactgtcaagccccagatcattttctgtttgccaagttgaaaacccaaaccaatgcatctgactttcccattgggacatctttaaagtacgaatgccgtcctgagtactacgggaggccattctctatcacatgtctagataacctggtctggtcaagtcccaaagatgtctgtaaacgtaaatcatgtaaaactcctccagatccagtgaatggcatggtgcatgtgatcacagacatccaggttggatccagaatcaactattcttgtactacagggcaccgactcattggtcactcatctgctgaatgtatcctctcaggcaatactgcccattggagcacgaagccgccaatttgtcaacgaattccttgtgggctacccccaaccatcgccaatggagatttcattagcaccaacagagagaattttcactatggatcagtggtgacctaccgctgcaatcttggaagcagagggagaaaggtgtttgagcttgtgggtgagccctccatatactgcaccagcaatgacgatcaagtgggcatctggagcggccccgcccctcagtgcattatacctaacaaatgcacgcctccaaatgtggaaaatggaatattggtatctgacaacagaagcttattttccttaaatgaagttgtggagtttaggtgtcagcctggctttgtcatgaaaggaccccgccgtgtgaagtgccaggccctgaacaaatgggagccagagttaccaagctgctccagggtgtgtcagccgcctccagaaatcctgcatggtgagcataccccaagccatcaggacaacttttcacctgggcaggaagtgttctacagctgtgagcctggctatgacctcagaggggctgcgtctctgcactgcacaccccagggagactggagccctgaagccccgagatgtgcagtgaaatcctgtgatgacttcttgggtcaactccctcatggccgtgtgctatttccacttaatctccagcttggggcaaaggtgtcctttgtctgtgatgaagggtttcgcttaaagggcagttccgttagtcattgtgtcttggttggaatgagaagcctttggaataacagtgttcctgtgtgtgaacatatcttttgtccaaatcctccagctatccttaatgggagacacacaggaactccctctggagatattccctatggaaaagaaatatcttacacatgtgacccccacccagacagagggatgaccttcaacctcattggggagagcaccatccgctgcacaagtgaccctcatgggaatggggtttggagcagccctgcccctcgctgtgaactttctgttcgtgctggtcactgtaaaaccccagagcagtttccatttgccagtcctacgatcccaattaatgactttgagtttccagtcgggacatctttgaattatgaatgccgtcctgggtattttgggaaaatgttctctatctcctgcctagaaaacttggtctggtcaagtgttgaagacaactgtagacgaaaatcatgtggacctccaccagaacccttcaatggaatggtgcatataaacacagatacacagtttggatcaacagttaattattcttgtaatgaagggtttcgactcattggttccccatctactacttgtctcgtctcaggcaataatgtcacatgggataagaaggcacctatttgtgagatcatatcttgtgagccacctccaaccatatccaatggagacttctacagcaacaatagaacatcttttcacaatggaacggtggtaacttaccagtgccacactggaccagatggagaacagctgtttgagcttgtgggagaacggtcaatatattgcaccagcaaagatgatcaagttggtgtttggagcagccctccccctcggtgtatttctactaataaatgcacagctccagaagttgaaaatgcaattagagtaccaggaaacaggagtttcttttccctcactgagatcatcagatttagatgtcagcccgggtttgtcatggtagggtcccacactgtgcagtgccagaccaatggcagatgggggcccaagctgccacactgctccagggtgtgtcagccgcctccagaaatcctgcatggtgagcataccctaagccatcaggacaacttttcacctgggcaggaagtgttctacagctgtgagcccagctatgacctcagaggggctgcgtctctgcactgcacgccccagggagactggagccctgaagcccctagatgtacagtgaaatcctgtgatgacttcctgggccaactccctcatggccgtgtgctacttccacttaatctccagcttggggcaaaggtgtcctttgtttgcgatgaagggttccgattaaaaggcaggtctgctagtcattgtgtcttggctggaatgaaagccctttggaatagcagtgttccagtgtgtgaacaaatcttttgtccaaatcctccagctatccttaatgggagacacacaggaactccctttggagatattccctatggaaaagaaatatcttacgcatgcgacacccacccagacagagggatgaccttcaacctcattggggagagctccatccgctgcacaagtgaccctcaagggaatggggtttggagcagccctgcccctcgctgtgaactttctgttcctgctgcctgcccacatccacccaagatccaaaacgggcattacattggaggacacgtatctctatatcttcctgggatgacaatcagctacacttgtgaccccggctacctgttagtgggaaagggcttcattttctgtacagaccagggaatctggagccaattggatcattattgcaaagaagtaaattgtagcttcccactgtttatgaatggaatctcgaaggagttagaaatgaaaaaagtatatcactatggagattatgtgactttgaagtgtgaagatgggtatactctggaaggcagtccctggagccagtgccaggcggatgacagatgggaccctcctctggccaaatgtacctctcgtgcacatgatgctctcatagttggcactttatctggtacgatcttctttattttactcatcattttcctctcttggataattctaaagcacagaaaaggcaataatgcacatgaaaaccctaaagaagtggctatccatttacattctcaaggaggcagcagcgttcatccccgaactctgcaaacaaatgaagaaaatagcagggtccttccttgacaaagtactatacagctgaagaacatctcgaatacaattttggtgggaaaggagccaattgatttcaacagaatcagatctgagcttcataaagtctttgaagtgacttcacagagacgcagacatgtgcacttgaagatgctgccccttccctggtacctagcaaagctcctgcctctttgtgtgcgtcactgtgaaacccccacccttctgcctcgtgctaaacgcacacagtatctagtcaggggaaaagactgcatttaggagatagaaaatagtttggattacttaaaggaataaggtgttgcctggaatttctggtttgtaaggtggtcactgttcttttttaaaatatttgtaatatggaatgggctcagtaagaagagcttggaaaatgcagaaagttatgaaaaataagtcacttataattatgctacctactgataaccactcctaatattttgattcattttctgcctatcttctttcacatatgtgtttttttacatacgtacttttccccccttagtttgtttccttttattttatagagcagaaccctagtcttttaaacagtttagagtgaaatatatgctatatcagtttttactttctctagggagaaaaattaatttactagaaaggcatgaaatgatcatgggaagagtggttaagactactgaagagaaatatttggaaaataagatttcgatatcttctttttttttgagatggagtctggctctgtctcccaggctggagtgcagtggcgtaatctcggctcactgcaacgtccgcctcccg

SEQ ID NO: 1266 - DNA, 2033 bp; single-stranded, linear
  immediate source library: GENBANK
  immediate source clone: g30220
ggagaatccccggaaaggctgagtctccagctcaaggtcaaaacgtccaaggccgaaagccctccagtttcccctggacgccttgctcctgcttctgctacgaccttctggggaaaacgaatttctcattttcttcttaaattgccattttcgctttaggagatgaatgttttcctttggctgttttggcaatgactctgaattaaagcgatgctaacgcctcttttccccctaattgttaaaagctatggactgcaggaagatggcccgcttctcttacagtgtgatttggatcatggccatttctaaagtctttgaactgggattagttgccgggctgggccatcaggaatttgctcgtccatctcggggatacctggccttcagagatgacagcatttggccccaggaggagcctgcaattcggcctcggtcttcccagcgtgtgccgcccatggggatacagcacagtaaggagctaaacagaacctgctgcctgaatgggggaacctgcatgctggggtccttttgtgcctgccctccctccttctacggacggaactgtgagcacgatgtgcgcaaagagaactgtgggtctgtgccccatgacacctggctgcccaagaagtgttccctgtgtaaatgctggcacggtcagctccgctgctttcctcaggcatttctacccggctgtgatggccttgtgatggatgagcacctcgtggcttccaggactccagaactaccaccgtctgcacgtactaccacttttatgctagttggcatctgcctttctatacaaagctactattaatcgacattgacctatttccagaaatacaattttagatatcatgcaaatttcatgaccagtaaaggctgctgctacaatgtcctaactgaaagatgatcatttgtagttgccttaaaataatgaatacaatttccaaaatggtctctaacatttccttacagaactacttcttacttctttgccctgccctctcccaaaaaactacttcttttttcaaaagaaagtcagccatatctccattgtgcctaagtccagtgtttctttttttttttttttttgagacggagtctcactctgtcacccaggctggactgcaatgacgcgatcttggttcactgcaacctccgcatccggggttcaagccattctcctgcctaagcctcccaagtaactgggattacaggcatgtgtcaccatgcccagctaatttttttgtattttagtagagatgggggtttcaccatattggccagtctggtctcgaactctgaccttgtgatccatcgatcagcctctcgagtgctgagattacacacgtgagcaactgtgcaaggcctggtgtttcttgatacatgtaattctaccaaggtcttcttaatatgttcttttaaatgattgaattatatgttcagattattggagactaattctaatgtggaccttagaatacagttttgagtagagttgatcaaaatcaattaaaatagtctctttaaaaggaaagaaaacatctttaaggggaggaaccagagtgctgaaggaatggaagtccatctgcgtgtgtgcagggagactgggtaggaaagaggaagcaaatagaagagagaggttgaaaaacaaaatgggttacttgattggtgattaggtggtggtagagaagcaagtaaaaaggctaaatggaagggcaagtttccatcatctatagaaagctatataagacaagaactcccctttttttcccaaaggcattataaaaagaatgaagcctccttagaaaaaaaattatacctcaatgtccccaacaagattgcttaataaattgtgtttcctccaagctattcaattcttttaactgttgtagaagacaaaatgttcacaatatatttagttgtaaaccaagtgatcaaactacatattgtaaagcccatttttaaaatacattgtatatatgtgtatgcacagtaaaaatggaaactatattgacctaaaaaaaaaaaaa

SEQ ID NO: 1267 - DNA, 2187 bp; single-stranded, linear
  immediate source library: GENBANK
  immediate source clone: g30255
gcgccgcgtcccgcaggccgtgatgccgcccgcgcggaggtggcccggaccgcagtgccccaagagagctctaatggtaccaagtgacaggttggctttactgtgactcggggacgccagagctcctgagaagatgtcagcaatacaggccgcctggccatccggtacagaatgtattgccaagtacaacttccacggcactgccgagcaggacctgcccttctgcaaaggagacgtgctcaccattgtggccgtcaccaaggaccccaactggtacaaagccaaaaacaaggtgggccgtgagggcatcatcccagccaactacgtccagaagcgggagggcgtgaaggcgggtaccaaactcagcctcatgccttggttccacggcaagatcacacgggagcaggctgagcggcttctgtacccgccggagacaggcctgttcctggtgcgggagagcaccaactaccccggagactacacgctgtgcgtgagctgcgacggcaaggtggagcactaccgcatcatgtaccatgccagcaagctcagcatcgacgaggaggtgtactttgagaacctcatgcagctggtggagcactacacctcagacgcagatggactctgtacgcgcctcattaaaccaaaggtcatggagggcacagtggcggcccaggatgagttctaccgcagcggctgggccctgaacatgaaggagctgaagctgctgcagaccatcgggaagggggagttcggagacgtgatgctgggcgattaccgagggaacaaagtcgccgtcaagtgcattaagaacgacgccactgcccaggccttcctggctgaagcctcagtcatgacgcaactgcggcatagcaacctggtgcagctcctgggcgtgatcgtggaggagaagggcgggctctacatcgtcactgagtacatggccaaggggagccttgtggactacctgcggtctaggggtcggtcagtgctgggcggagactgtctcctcaagttctcgctagatgtctgcgaggccatggaatacctggagggcaacaatttcgtgcatcgagacctggctgcccgcaatgtgctggtgtctgaggacaacgtggccaaggtcagcgactttggtctcaccaaggaggcgtccagcacccaggacacgggcaagctgccagtcaagtggacagcccctgaggccctgagagagaagaaattctccactaagtctgacgtgtggagtttcggaatccttctctgggaaatctactcctttgggcgagtgccttatccaagaattcccctgaaggacgtcgtccctcgggtggagaagggctacaagatggatgcccccgacggctgcccgcccgcagtctatgaagtcatgaagaactgctggcacctggacgccgccatgcggccctccttcctacagctccgagagcagcttgagcacatcaaaacccacgagctgcacctgtgacggctggcctccgcctgggtcatgggcctgtggggactgaacctggaagatcatggacctggtgcccctgctcactgggcccgagcctgaactgagccccagcgggctggcgggcctttttcctgcgtcccagcctgcacccctccggccccgtctctcttggacccacctgtggggcctggggagcccactgaggggccagggaggaaggaggccacggagcgggaggcagcgccccaccacgtcgggcttccctggcctcccgccactcgccttcttagagttttattcctttccttttttgagattttttttccgtgtgtttattttttattatttttcaagataaggagaaagaaagtacccagcaaatgggcattttacaagaagtacgaatcttatttttcctgtcctgcccgtgagggtgggggggaccgggcccctctctagggacccctcgccccagcctcattccccattctgtgtcccatgtcccgtgtctcctcggtcgccccgtgtttgcgcttgaccatgttgcactgtttgcatgcgcccgaggcagacgtctgtcaggggcttggatttcgtgtgccgctgccacccgcccacccgccttgtgagatggaattgtaataaaccacgccatgaggacaccgccgcccgcctcggcgcttcctccaccgaaaaaaaaaaaaaaaaaa

SEQ ID NO: 1268 - DNA, 1649 bp; single-stranded, linear
  immediate source library: GENBANK
  immediate source clone: g30306
cggcagccagcctattctttggccgggtcggtgcgagtggtcggctgggcagagtgcacgctgcttggcgccgcaggtgatcccgccgtccactcccgggagcagtgatgttgggcaactctgcgccggggcctgcgacccgcgaggcgggctcggcgctgctagcattgcagcagacggcgctccaagaggaccaggagaatatcaacccggaaaaggcagcgcccgtccaacaaccgcggacccgggccgcgctggcggtactgaagtccgggaacccgcggggtctagcgcagcagcagaggccgaagacgagacgggttgcaccccttaaggatcttcctgtaaatgatgagcatgtcaccgttcctccttggaaagcaaacagtaaacagcctgcgttcaccattcatgtggatgaagcagaaaaagaagctcagaagaagccagctgaatctcaaaaaatagagcgtgaagatgccctggcttttaattcagccattagtttacctggacccagaaaaccattggtccctcttgattatccaatggatggtagttttgagtcaccacatactatggacatgtcaattgtattagaagatgaaaagccagtgagtgttaatgaagtaccagactaccatgaggatattcacacataccttagggaaatggaggttaaatgtaaacctaaagtgggttacatgaagaaacagccagacatcactaacagtatgagagctatcctcgtggactggttagttgaagtaggagaagaatataaactacagaatgagaccctgcatttggctgtgaactacattgataggttcctgtcttccatgtcagtgctgagaggaaaacttcagcttgtgggcactgctgctatgctgttagcctcaaagtttgaagaaatataccccccagaagtagcagagtttgtgtacattacagatgatacctacaccaagaaacaagttctgagaatggagcatctagttttgaaagtccttacttttgacttagctgctccaacagtaaatcagtttcttacccaatactttctgcatcagcagcctgcaaactgcaaagttgaaagtttagcaatgtttttgggagaattaagtttgatagatgctgacccatacctcaagtatttgccatcagttattgctggagctgcctttcatttagcactctacacagtcacgggacaaagctggcctgaatcattaatacgaaagactggatataccctggaaagtcttaagccttgtctcatggaccttcaccagacctacctcaaagcaccacagcatgcacaacagtcaataagagaaaagtacaaaaattcaaagtatcatggtgtttctctcctcaacccaccagagacactaaatctgtaacaatgaaagactgcctttgttttctaagatgtaaatcactcaaagtatatggtgtacagtttttaacttaggtttttaattttacaatcatttctgaatacagaagttgtggccaagtacaaattatggtatctattactttttaaatggttttaatttgtatatcttttgtatatgtatctgtcttagatatttggctaattttaagtggttttgttaaagtattaatgatgccagctgccg

SEQ ID NO: 1269 - DNA, 723 bp; single-stranded, linear
  immediate source library: GENBANK
  immediate source clone: g30308
gtgtactattagccatggtcaaccccaccgtgttcttcgacattgccgtcgacggcgagcccttgggccgcgtctcctttgagctgtttgcagacaaggtcccaaagacagcagaaaattttcgtgctctgagcactggagagaaaggatttggttataagggttcctgctttcacagaattattccagggtttatgtgtcagggtggtgacttcacacgccataatggcactggtggcaagtccatctatggggagaaatttgaagatgagaacttcatcctaaagcatacgggtcctggcatcttgtccatggcaaatgctggacccaacacaaatggttcccagtttttcatctgcactgccaagactgagtggttggatggcaagcatgtggtgtttggcaaagtgaaagaaggcatgaatattgtggaggccatggagcgctttgggtccaggaatggcaagaccagcaagaagatcaccattgctgactgtggacaactcgaataagtttgacttgtgttttatcttaaccaccagatcattccttctgtagctcaggagagcacccctccaccccatttgctcgcagtatcctagaatctttgtgctctcgctgcagttccctttgggttccatgttttccttgttccctcccatgcctagctggattgcagagttaagtttatgattatgaaataaaaactaaataacaattgtc

SEQ ID NO: 1270 - DNA, 1185 bp; single-stranded, linear
  immediate source library: GENBANK
  immediate source clone: g303602
tgctcctgacagaaggatgccacagctgagcctgtcctcgctgggcctttggccaatggcagcatccccgtggctgctcctgctgctggttggggcctcctggctcctggcccgcatcctggcctggacctataccttctatgacaactgctgccgcctccggtgtttcccgcaacccccgaaacggaattggttcttgggtcacctgggcctgattcacagctcggaggaaggtctcctatacacacaaagcctggcatgcaccttcggtgatatgtgctgctggtgggtggggccctggcacgcaatcgtccgcatcttccaccccacctacatcaagcctgtgctctttgctccagctgccattgtaccaaaggacaaggtcttctacagcttcctgaagccctggctgggggatgggctcctgctgagtgctggtgaaaagtggagccgccaccgtcggatgctgacgcctgccttccatttcaacatcctgaagccctatatgaagattttcaatgagagtgtgaacatcatgcatgccaagtggcagctcctggcctcagagggtagtgcccgtctggacatgtttgagcacatcagcctcatgaccttggacagtctacagaaatgtgtcttcagctttgacagccattgccaggagaagcccagtgaatatattgccgccatcttggagctcagtgcccttgtgacaaaaagacaccagcagatcctcctgtacatagacttcctgtattatctcacccctgatgggcagcgtttccgcagggcctgccgcctggtgcacgacttcacagatgccgtcatccaggagcggcgccgcaccctccctagccagggtgttgatgacttcctccaagccaaggccaaatccaagactttggacttcattgatgtactcctgctgagcaaggatgaagatgggaagaagttgtccgatgaggacataagagcagaagctgacacctttatgtttgagggccatgacaccacagccagtggtctctcctgggtcctgtaccaccttgcaaagcacccagaataccaggagcgctgtcggcaggaggtgcaagagcttctgaaggaccgtgagcctaaagagattgaatgggacgacctggcccagctgcccttcctgaccatgtgcattaaggagagcctgag

SEQ ID NO: 1271 - DNA, 1451 bp; single-stranded, linear
  immediate source library: GENBANK
  immediate source clone: g303611
gaagagcaagcgccatgttgaagccatcattaccattcacatccctcttattcctgcagctgcccctgctgggagtggggctgaacacgacaattctgacgcccaatgggaatgaagacaccacagctgatttcttcctgaccactatgcccactgactccctcagtgtttccactctgcccctcccagaggttcagtgttttgtgttcaatgtcgagtacatgaattgcacttggaacagcagctctgagccccagcctaccaacctcactctgcattattggtacaagaactcggataatgataaagtccagaagtgcagccactatctattctctgaagaaatcacttctggctgtcagttgcaaaaaaaggagatccacctctaccaaacatttgttgttcagctccaggacccacgggaacccaggagacaggccacacagatgctaaaactgcagaatctggtgatcccctgggctccagagaacctaacacttcacaaactgagtgaatcccagctagaactgaactggaacaacagattcttgaaccactgtttggagcacttggtgcagtaccggactgactgggaccacagctggactgaacaatcagtggattatagacataagttctccttgcctagtgtggatgggcagaaacgctacacgtttcgtgttcggagccgctttaacccactctgtggaagtgctcagcattggagtgaatggagccacccaatccactgggggagcaatacttcaaaagagaatcctttcctgtttgcattggaagccgtggttatctctgttggctccatgggattgattatcagccttctctgtgtgtatttctggctggaacggacgatgccccgaattcccaccctgaagaacctagaggatcttgttactgaataccacgggaacttttcggcctggagtggtgtgtctaagggactggctgagagtctgcagccagactacagtgaacgactctgcctcgtcagtgagattcccccaaaaggaggggcccttggggaggggcctggggcctccccatgcaaccagcatagcccctactgggcccccccatgttacaccctaaagcctgaaacctgaaccccaatcctctgacagaagaaccccagggtcctgtagccctaagtggtactaactttccttcattcaacccacctgcgtctcatactcacctcaccccactgtggctgatttggaattttgtgcccccatgtaagcaccccttcatttggcattccccacttgagaattacccttttgccccgaacatgtttttcttctccctcagtctggcccttccttttcgcaggattcttcctccctccctctttccctcccttcctctttccatctaccctccgattgttcctgaaccgatgagaaataaagtttctgttgataatcatc

SEQ ID NO: 1272 - DNA, 3803 bp; single-stranded, linear
  immediate source library: GENBANK
  immediate source clone: g306474
ggctcccgacacccgagccccgccgcgcctcccgctcccggctcccggctcccgctcctggctccctccgcctcccccgcccctcgccccgccgccgaagaggcccgctcccggtcggacgcctgggtctgccgggaagagcgatgagagagatgctgcccccacccccttaggcccgagggatcaggagctatgggaccagaggccctgtcatctttactgctgctgctcttggtggcaagtggagatgctgacatgaagggacattttgatcctgccaagtgccgctatgccctgggcatgcaggaccggaccatcccagacagtgacatctctgcttccagctcctggtcagattccactgccgcccgccacagcaggttggagagcagtgacggggatggggcctggtgccccgcagggtcggtgtttcccaaggaggaggagtacttgcaggtggatctacaacgactgcacctggtggctctggtgggcacccagggacggcatgccgggggcctgggcaaggagttctcccggagctaccggctgcgttactcccgggatggtcgccgctggatgggctggaaggaccgctggggtcaggaggtgatctcaggcaatgaggaccctgagggagtggtgctgaaggaccttgggccccccatggttgcccgactggttcgcttctacccccgggctgaccgggtcatgagcgtctgtctgcgggtagagctctatggctgcctctggagggatggactcctgtcttacaccgcccctgtggggcagacaatgtatttatctgaggccgtgtacctcaacgactccacctatgacggacataccgtgggcggactgcagtatgggggtctgggccagctggcagatggtgtggtggggctggatgactttaggaagagtcaggagctgcgggtctggccaggctatgactatgtgggatggagcaaccacagcttctccagtggctatgtggagatggagtttgagtttgaccggctgagggccttccaggctatgcaggtccactgtaacaacatgcacacgctgggagcccgtctgcctggcggggtggaatgtcgcttccggcgtggccctgccatggcctgggagggggagcccatgcgccacaacctagggggcaacctgggggaccccagagcccgggctgtctcagtgccccttggcggccgtgtggctcgctttctgcagtgccgcttcctctttgcggggccctggttactcttcagcgaaatctccttcatctctgatgtggtgaacaattcctctccggcactgggaggcaccttcccgccagccccctggtggccgcctggcccacctcccaccaacttcagcagcttggagctggagcccagaggccagcagcccgtggccaaggccgaggggagcccgaccgccatcctcatcggctgcctggtggccatcatcctgctcctgctgctcatcattgccctcatgctctggcggctgcactggcgcaggctcctcagcaaggctgaacggagggtgttggaagaggagctgacggttcacctctctgtccctggggacactatcctcatcaacaaccgcccaggtcctagagagccacccccgtaccaggagccccggcctcgtgggaatccgccccactccgctccctgtgtccccaatggctctgcgttgctgctctccaatccagcctaccgcctccttctggccacttacgcccgtccccctcgaggcccgggcccccccacacccgcctgggccaaacccaccaacacccaggcctacagtggggactatatggagcctgagaagccaggcgccccgcttctgcccccacctccccagaacagcgtcccccattatgccgaggctgacattgttaccctgcagggcgtcaccgggggcaacacctatgctgtgcctgcactgcccccaggggcagtcggggatgggccccccagagtggatttccctcgatctcgactccgcttcaaggagaagcttggcgagggccagtttggggaggtgcacctgtgtgaggtcgacagccctcaagatctggttagtcttgatttcccccttaatgtgcgtaagggacaccctttgctggtagctgtcaagatcttacggccagatgccaccaagaatgccaggaatgatttcctgaaagaggtgaagatcatgtcgaggctcaaggacccaaacatcattcggctgctgggcgtgtgtgtgcaggacgaccccctctgcatgattactgactacatggagaacggcgacctcaaccagttcctcagtgcccaccagctggaggacaaggcagccgagggggcccctggggacgggcaggctgcgcaggggcccaccatcagctacccaatgctgctgcatgtggcagcccagatcgcctccggcatgcgctatctggccacactcaactttgtacatcgggacctggccacgcggaactgcctagttggggaaaatttcaccatcaaaatcgcagactttggcatgagccggaacctctatgctggggactattaccgtgtgcagggccgggcagtgctgcccatccgctggatggcctgggagtgcatcctcatggggaagttcacgactgcgagtgacgtgtgggcctttggtgtgaccctgtgggaggtgctgatgctctgtagggcccagccctttgggcagctcaccgacgagcaggtcatcgagaacgcgggggagttcttccgggaccagggccggcaggtgtacctgtcccggccgcctgcctgcccgcagggcctatatgagctgatgcttcggtgctggagccgggagtctgagcagcgaccacccttttcccagctgcatcggttcctggcagaggatgcactcaacacggtgtgaatcacacatccagctgcccctccctcagggagcgatccaggggaagccagtgacactaaaacaagaggacacaatggcacctctgcccttcccctcccgacagcccatcacctctaatagaggcagtgagactgcaggtgggctgggcaagggagctgatgccccttctccccttcctggacacactctcatgtccccttcctgttcttccttcctagaagcccctgtcgcccacccagctggtcctgtggatgggatcctctccaccctcctctagccatcccttggggaagggtggggaaaaatataggatagacactggacatggccaattggagaacctgggccccactggacaacactgattcctggagaggagaccccagcttctctctccctgtcacacactggaccccactggctgagaatctgggggtgaggaggacaagaaggagaggaaaatgtttccttgtgcctgctcctgtacttgtcctcagcttgggcttcttcctcctccatcacctgaaacactggacctgggggtagccccgccccagccctcagtcacccccacttcccacttgcagtcttgtagctagactctctaagcctatacgtttctgtggagtaaatattgggattggggggaaatagggtgcaacgcccatagccttggggttggacatctctagtgtagctgccacattgatttttctataatcacttggggtttgtacatttttggggggagagacacagattttacactaatatatggacctagcttgaggcaattttaatccctgcactaggcaggtaataataaatgttgagttttccaaaaaaaaaaaaaaaaaaaaaaaaaaaaa

SEQ ID NO: 1273 - DNA, 1576 bp; single-stranded, linear
  immediate source library: GENBANK
  immediate source clone: g307184
gaattcgagccgaccgaccgctcccggcccgccccctatgggccccggctagaggcgccgccgccgccggcccgcggagccccgatgctggcccggaggaagccggtgctgccggcgctcaccatcaaccctaccatcgccgagggcccatcccctaccagcgagggcgcctccgaggcaaacctggtggacctgcagaagaagctggaggagctggaacttgacgagcagcagaagaagcggctggaagcctttctcacccagaaagccaaggttggcgaactcaaagacgatgacttcgaaaggatctcagagctgggcgcgggcaacggcggggtggtcaccaaagtccagcacagaccctcgggcctcatcatggccaggaagctgatccaccttgagatcaagccggccatccggaaccagatcatccgcgagctgcaggtcctgcacgaatgcaactcgccgtacatcgtgggcttctacggggccttctacagtgacggggagatcagcatttgcatggaacacatggacggcggctccctggaccaggtgctgaaagaggccaagaggattcccgaggagatcctggggaaagtcagcatcgcggttctccggggcttggcgtacctccgagagaagcaccagatcatgcaccgagatgtgaagccctccaacatcctcgtgaactctagaggggagatcaagctgtgtgacttcggggtgagcggccagctcatagactccatggccaactccttcgtgggcacgcgctcctacatggctccggagcggttgcagggcacacattactcggtgcagtcggacatctggagcatgggcctgtccctggtggagctggccgtcggaaggtaccccatccccccgcccgacgccaaagagctggaggccatctttggccggcccgtggtcgacggggaagaaggagagcctcacagcatctcgcctcggccgaggccccccgggcgccccgtcagcggtcacgggatggatagccggcctgccatggccatctttgaactcctggactatattgtgaacgagccacctcctaagctgcccaacggtgtgttcacccccgacttccaggagtttgtcaataaatgcctcatcaagaacccagcggagcgggcggacctgaagatgctcacaaaccacaccttcatcaagcggtccgaggtggaagaagtggattttgccggctggttgtgtaaaaccctgcggctgaaccagcccggcacacccacgcgcaccgccgtgtgacagtggccgggctccctgcgtcccgctggtgacctgcccaccgtccctgtccatgccccgcccttccagctgaggacacgtggcgcctccacccaccctcctgcctcaccctgcggagagcaccgtggcggggcgacagcgcatgcaggaacgggggtctcctctcctgccagtcctggccggggtgcctctggggacgggcgacgctgctgtgtgtggtctcagaggctctgcttccttaggttacaaaacaaaacagggagagaaaagcaaaaaaaaaaaaaaaaaa

SEQ ID NO: 1274 - DNA, 2444 bp; single-stranded, linear
  immediate source library: GENBANK
  immediate source clone: g307299
ggcacgaggcggggccgggtcgcagctgggcccgcggcatggacgaactgttccccctcatcttcccggcagagcagcccaagcagcggggcatgcgcttccgctacaagtgcgaggggcgctccgcgggcagcatcccaggcgagaggagcacagataccaccaagacccaccccaccatcaagatcaatggctacacaggaccagggacagtgcgcatctccctggtcaccaaggaccctcctcaccggcctcacccccacgagcttgtaggaaaggactgccgggatggcttctatgaggctgagctctgcccggaccgctgcatccacagtttccagaacctgggaatccagtgtgtgaagaagcgggacctggagcaggctatcagtcagcgcatccagaccaacaacaaccccttccaagttcctatagaagagcagcgtggggactacgacctgaatgctgtgcggctctgcttccaggtgacagtgcgggacccatcaggcaggcccctccgcctgccgcctgtcctttctcatcccatctttgacaatcgtgcccccaacactgccgagctcaagatctgccgagtgaaccgaaactctggcagctgcctcggtggggatgagatcttcctactgtgtgacaaggtgcagaaagaggacattgaggtgtatttcacgggaccaggctgggaggcccgaggctccttttcgcaagctgatgtgcaccgacaagtggccattgtgttccggacccctccctacgcagaccccagcctgcaggctcctgtgcgtgtctccatgcagctgcggcggccttccgaccgggagctcagtgagcccatggaattccagtacctgccagatacagacgatcgtcaccggattgaggagaaacgtaaaaggacatatgagaccttcaagagcatcatgaagaagagtcctttcagcggacccaccgacccccggcctccacctcgacgcattgctgtgccttcccgcagctcagcttctgtccccaagccagcaccccagccctatccctttacgtcatccctgagcaccatcaactatgatgagtttcccaccatggtgtttccttctgggcagatcagccaggcctcggccttggccccggcccctccccaagtcctgccccaggctccagcccctgcccctgctccagccatggtatcagctctggcccaggccccagcccctgtcccagtcctagccccaggccctcctcaggctgtggccccacctgcccccaagcccacccaggctggggaaggaacgctgtcagaggccctgctgcagctgcagtttgatgatgaagacctgggggccttgcttggcaacagcacagacccagctgtgttcacagacctggcatccgtcgacaactccgagtttcagcagctgctgaaccagggcatacctgtggccccccacacaactgagcccatgctgatggagtaccctgaggctataactcgcctagtgacagcccagaggccccccgacccagctcctgctccactgggggccccggggctccccaatggcctcctttcaggagatgaagacttctcctccattgcggacatggacttctcagccctgctgagtcagatcagctcctaagggggtgacgcctgccctccccagagcactggttgcaggggattgaagccctccaaaagcacttacggattctggtggggtgtgttccaactgcccccaactttgtggatgtcttccttggaggggggagccatattttattcttttattgtcagtatctgtatctctctctctttttggaggtgcttaagcagaagcattaacttctctggaaaggggggagctggggaaactcaaacttttcccctgtcctgatggtcagctcccttctctgtagggaactgtggggtcccccatccccatcctccagcttctggtactctcctagagacagaagcaggctggaggtaaggcctttgagcccacaaagccttatcaagtgtcttccatcatggattcattacagcttaatcaaaataacgccccagataccagcccctgtatggcactggcattgtccctgtgcctaacaccagcgtttgaggggctgccttcctgccctacagaggtctctgccggctctttccttgctcaaccatggctgaaggaaacagtgcaacagcactggctctctccaggatccagaaggggtttggtctggacttccttgctctcccctcttctcaagtgccttaatagtagggtaagttgttaagagtgggggagagcaggctggcagctctccagtcaggaggcatagtttttagtgaacaatcaaagcacttggactcttgctctttctactctgaactaataaagctgttgccaagctggacggcacgagctcgtgcc

SEQ ID NO: 1275 - DNA, 810 bp; single-stranded, linear
  immediate source library: GENBANK
  immediate source clone: g307387
atggagggtgtagaagagaagaagaaggaggttcctgctgtgccagaaacccttaagaaaaagcgaaggaatttcgcagagctgaagatcaagcgcctgagaaagaagtttgcccaaaagatgcttcgaaaggcaaggaggaagcttatctatgaaaaagcaaagcactatcacaaggaatataggcagatgtacagaactgaaattcgaatggcgaggatggcaagaaaagctggcaacttctatgtacctgcagaacccaaattggcgtttgtcatcagaatcagaggtatcaatggagtgagcccaaaggttcgaaaggtgttgcagcttcttcgccttcgtcaaatcttcaatggaacctttgtgaagctcaacaaggcttcgattaacatgctgaggattgtagagccatatattgcatgggggtaccccaatctgaagtcagtaaatgaactaatctacaagcgtggttatggcaaaatcaataagaagcgaattgctttgacagataactctttgattgctcgatctcttggtaaatacggcatcatctgcatggaggatttgattcatgagatctatactgttggaaaacgcttcaaagaggcaaataacttcctgtggcccttcaaattgtcttctccacgaggtggaatgaagaaaaagaccacccattttgtagaaggtggagatgctggcaacagggaggaccagatcaacaggcttattagaagaatgaactaaggtgtctaccatgattatttttctaagctggttggttaataaacagtacctgctctcaaattg

SEQ ID NO: 1276 - DNA, 530 bp; single-stranded, linear
  immediate source library: GENBANK
  immediate source clone: g307390
cgctctcctttcgttgcctgatcgccgccatcatgggtcgcatgcatgctcccgggaagggcctgtcccagtcggctttaccctatcgacgcagcgtccccacttggttgaagttgacatctgacgacgtgaaggagcagatttacaaactggccaagaagggccttactccttcacagatcggtgtaatcctgagagattcacatggtgttgcacaagtacgttttgtgacaggcaataaaattttaagaattcttaagtctaagggacttgctcctgatcttcctgaagatctctaccatttaattaagaaagcagttgctgttcgaaagcatcttgagaggaacagaaaggataaggatgctaaattccgtctgattctaatagagagccggattcaccgtttggctcgatattataagaccaagcgagtcctccctcccaattggaaatatgaatcatctacagcctctgccctggtcgcataaatttgtctgtgtactcaagcaataaaatgattgtttaacgta

SEQ ID NO: 1277 - DNA, 2608 bp; single-stranded, linear
  immediate source library: GENBANK
  immediate source clone: g30820
gaccagtggccacctctgcagtgtcttccacaacctggtcttgactcgtctgctgaacaaatcctctgacctcaggccggctgtgaacgtagttcctgagagatagcaaacatgcccaacagtgagcccgcatctctgctggagctgttcaacagcatcgccacacaaggggagctcgtaaggtccctcaaagcgggaaatgcgtcaaaggatgaaattgattctgcagtaaagatgttggtgtcattaaaaatgagctacaaagctgccgcgggggaggattacaaggctgactgtcctccagggaacccagcacctaccagtaatcatggcccagatgccacagaagctgaagaggattttgtggacccatggacagtacagacaagcagtgcaaaaggcatagactacgataagctcattgttcggtttggaagtagtaaaattgacaaagagctaataaaccgaatagagagagccaccggccaaagaccacaccacttcctgcgcagaggcatcttcttctcacacagagatatgaatcaggttcttgatgcctatgaaaataagaagccattttatctgtacacgggccggggcccctcttctgaagcaatgcatgtaggtcacctcattccatttattttcacaaagtggctccaggatgtatttaacgtgcccttggtcatccagatgacggatgacgagaagtatctgtggaaggacctgaccctggaccaggcctatagctatgctgtggagaatgccaaggacatcatcgcctgtggctttgacatcaacaagactttcatattctctgacctggactacatggggatgagctcaggtttctacaaaaatgtggtgaagattcaaaagcatgttaccttcaaccaagtgaaaggcattttcggcttcactgacagcgactgcattgggaagatcagttttcctgccatccaggctgctccctccttcagcaactcattcccacagatcttccgagacaggacggatatccagtgccttatcccatgtgccattgaccaggatccttactttagaatgacaagggacgtcgcccccaggatcggctatcctaaaccagccctgttgcactccaccttcttcccagccctgcagggcgcccagaccaaaatgagtgccagcgaccccaactcctccatcttcctcaccgacacggccaagcagatcaaaaccaaggtcaataagcatgcgttttctggagggagagacaccatcgaggagcacaggcagtttgggggcaactgtgatgtggacgtgtctttcatgtacctgaccttcttcctcgaggacgacgacaagctcgagcagatcaggaaggattacaccagcggagccatgctcaccggtgagctcaagaaggcactcatagaggttctgcagcccttgatcgcagagcaccaggcccggcgcaaggaggtcacggatgagatagtgaaagagttcatgactccccggaagctgtccttcgactttcagtagcactcgttttacatatgcttataaaagaagtgatgtatcagtaatgtatcaataatcccagcccagtcaaagcaccgccacctgtaggcttctgtctcatggtaattactgggcctggcctctgtaagcctgtgtatgttatcaatactgtttcttcctgtgagttccattatttctatctcttatgggcaaagcattgtgggtaattggtgctggctaacattgcatggtcggatagagaagtccagctgtgagtctctccccaaagcagccccacagtggagcctttggctggaagtccatgggccaccctgttcttgtccatggaggactccgagggttccaagtatactcttaagacccactctgtttaaaaatatatattctatgtatgcgtatatggaattgaaatgtcattattgtaacctagaaagtgctttgaaatattgatgtgggggaggtttattgagcacaagatgtatttcagcccatgccccctcccaaaaagaaattgataagtaaaagcttcgttatacatttgactaagaaatcacccagctttaaagctgcttttaacaatgaagattgaacagagttcagcaattttgattaaattaagacttgggggtgaaactttccagtttactgaactccagaccatgcatgtagtccactccagaaatcatgctcgcttcccttggcacaccagtgttctcctgccaaatgaccctagaccctctgtcctgcagagtcagggtggctttcccctgcatgtgtccgatgccaagagtcctggccttccgagatgcttcattttgacccttggctgcagtggaagtcagcacagagcagtgccctggctgtgtcctggacgggtggacttagctagggagaaagtcgagcagcagccctcgaggccctcacagatgtctagcaggcctcatttcatcacgcagcatgtgcaggcctggaagagcaaagccaaatctcagggaagtccttggttgatgtatctgggttcctctggagcactctgccctcctgtcacccagtagagttaaataaacttccttggctcctg

SEQ ID NO: 1278 - DNA, 1506 bp; single-stranded, linear
  immediate source library: GENBANK
  immediate source clone: g31097
acgggtttgccgccagaacacaggtgtcgtgaaaactacccctaaaagccaaaatgggaaaggaaaagactcatatcaacattgtcgtcattggacacgtagattcgggcaagtccaccactactggccatctgatctataaatgcggtggcatcgacaaaagaaccattgaaaaatttgagaaggaggctgctgagatgggaaagggctccttcaagtatgcctgggtcttggataaactgaaagctgagcgtgaacgtggtatcaccattgatatctccttgtggaaatttgagaccagcaagtactatgtgactatcattgatgccccaggacacagagactttatcaaaaacatgattacagggacatctcaggctgactgtgctgtcctgattgttgctgctggtgttggtgaatttgaagctggtatctccaagaatgggcagacccgagagcatgcccttctggcttacacactgggtgtgaaacaactaattgtcggtgttaacaaaatggattccactgagccaccctacagccagaagagatatgaggaaattgttaaggaagtcagcacttacattaagaaaattggctacaaccccgacacagtagcatttgtgccaatttctggttggaatggtgacaacatgctggagccaagtgctaacatgccttggttcaagggatggaaagtcacccgtaaggatggcaatgccagtggaaccacgctgcttgaggctctggactgcatcctaccaccaactcgtccaactgacaagcccttgcgcctgcctctccaggatgtctacaaaattggtggtattggtactgttcctgttggccgagtggagactggtgttctcaaacccggtatggtggtcacctttgctccagtcaacgttacaacggaagtaaaatctgtcgaaatgcaccatgaagctttgagtgaagctcttcctggggacaatgtgggcttcaatgtcaagaatgtgtctgtcaaggatgttcgtcgtggcaacgttgctggtgacagcaaaaatgacccaccaatggaagcagctggcttcactgctcaggtgattatcctgaaccatccaggccaaataagcgccggctatgcccctgtattggattgccacacggctcacattgcatgcaagtttgctgagctgaaggaaaagattgatcgccgttctggtaaaaagctggaagatggccctaaattcttgaagtctggtgatgctgccattgttgatatggttcctggcaagcccatgtgtgttgagagcttctcagactatccacctttgggtcgctttgctgttcgtgatatgagacagacagttgcggtgggtgtcatcaaagcagtggacaagaaggctgctggagctggcaaggtcaccaagtctgcccagaaagctcagaaggctaaatgaatattatccctaatacctgccacccaactcttaatcagtggtggaagaacggtctcagaactgt

SEQ ID NO: 1279 - DNA, 808 bp; single-stranded, linear
  immediate source library: GENBANK
  immediate source clone: g311374
tgctcccttgggctctagagaggaggcccctcttagccctcagcccctccttcctctctatcttaaagtaatttgatcctcaggaatttgttccgccctcatctggcccggccaaatcccgatttgacaaatgccaggaaaaggaaactgttgagaaaccgaaactactggggaaagggagggctcactgagtaaccatcccagtaacccgaccgccgctggtcttcgctggacaccatgagtcacactgtccaaaccttcttctctcctgtcaacagtggccagccccccaactatgagatgctcaaggaggagcacgaggtggctgtgctgggggggccccacaaccctgctcccccgacgtccaccgtgatccacatccgcagcgagacctccgtgcccgaccatgtcgtctggtccctgttcaacaccctcttcatgaacccctgctgcctgggcttcatagcattcgcctactccgtgaagtctagggacaggaagatggttggcgacgtgaccggggcccaggcctatgcctccaccgccaagtgcctgaacatctgggccctgattctgggcatcctcatgaccattctgctcatcgtcatcccagtgctgatcttccaggcctatggatagatcaggaggcatcactgaggccaggagctctgcccatgacctgtatcccacgtactccaacttccattcctcgccctgcccccggagccgagtcctgtatcagccctttatcctcacacgcttttctacaatggcattcaataaagtgcacgtgtttctggtgctgctg

SEQ ID NO: 1280 - DNA, 2545 bp; single-stranded, linear
  immediate source library: GENBANK
  immediate source clone: g311375
atccaatacaggagtgacttggaactccattctatcactatgaagaaaagtggtgttcttttcctcttgggcatcatcttgctggttctgattggagtgcaaggaaccccagtagtgagaaagggtcgctgttcctgcatcagcaccaaccaagggactatccacctacaatccttgaaagaccttaaacaatttgccccaagcccttcctgcgagaaaattgaaatcattgctacactgaagaatggagttcaaacatgtctaaacccagattcagcagatgtgaaggaactgattaaaaagtgggagaaacaggtcagccaaaagaaaaagcaaaagaatgggaaaaaacatcaaaaaaagaaagttctgaaagttcgaaaatctcaacgttctcgtcaaaagaagactacataagagaccacttcaccaataagtattctgtgttaaaaatgttctattttaattataccgctatcattccaaaggaggatggcatataatacaaaggcttattaatttgactagaaaatttaaaacattactctgaaattgtaactaaagttagaaagttgattttaagaatccaaacgttaagaattgttaaaggctatgattgtctttgttcttctaccacccaccagttgaatttcatcatgcttaaggccatgattttagcaatacccatgtctacacagatgttcacccaaccacatcccactcacaacagctgcctggaagagcagccctaggcttccacgtactgcagcctccagagagtatctgaggcacatgtcagcaagtcctaagcctgttagcatgctggtgagccaagcagtttgaaattgagctggacctcaccaagctgctgtggccatcaacctctgtatttgaatcagcctacaggcctcacacacaatgtgtctgagagattcatgctgattgttattgggtatcaccactggagatcaccagtgtgtggctttcagagcctcctttctggctttggaagccatgtgattccatcttgcccgctcaggctgaccactttatttctttttgttcccctttgcttcattcaagtcagctcttctccatcctaccacaatgcagtgcctttcttctctccagtgcacctgtcatatgctctgatttatctgagtcaactcctttctcatcttgtccccaacaccccacagaagtgctttcttctcccaattcatcctcactcagtccagcttagttcaagtcctgcctcttaaataaacctttttggacacacaaattatcttaaaactcctgtttcacttggttcagtaccacatgggtgaacactcaatggttaactaattcttgggtgtttatcctatctctccaaccagattgtcagctccttgagggcaagagccacagtatatttccctgtttcttccacagtgcctaataatactgtggaactaggttttaataattttttaattgatgttgttatgggcaggatggcaaccagaccattgtctcagagcaggtgctggctctttcctggctactccatgttggctagcctctggtaacctcttacttattatcttcaggacactcactacagggaccagggatgatgcaacatccttgtctttttatgacaggatgtttgctcagcttctccaacaataagaagcacgtggtaaaacacttgcggatattctggactgtttttaaaaaatatacagtttaccgaaaatcatataatcttacaatgaaaaggactttatagatcagccagtgaccaaccttttcccaaccatacaaaaattccttttcccgaaggaaaagggctttctcaataagcctcagctttctaagatctaacaagatagccaccgagatccttatcgaaactcattttaggcaaatatgagttttattgtccgtttacttgtttcagagtttgtattgtgattatcaattaccacaccatctcccatgaagaaagggaacggtgaagtactaagcgctagaggaagcagccaagtcggttagtggaagcatgattggtgcccagttagcctctgcaggatgtggaaacctccttccaggggaggttcagtgaattgtgtaggagaggttgtctgtggccagaatttaaacctatactcactttcccaaattgaatcactgctcacactgctgatgatttagagtgctgtccggtggagatcccacccgaacgtcttatctaatcatgaaactccctagttccttcatgtaacttccctgaaaaatctaagtgtttcataaatttgagagtctgtgacccacttaccttgcatctcacaggtagacagtatataactaacaaccaaagactacatattgtcactgacacacacgttataatcatttatcatatatatacatacatgcatacactctcaaagcaaataatttttcacttcaaaacagtattgacttgtataccttgtaatttgaaatattttctttgttaaaatagaatggtatcaataaatagaccattaatcag

SEQ ID NO: 1281 - DNA, 896 bp; single-stranded, linear
  immediate source library: GENBANK
  immediate source clone: g311699
cggggaggcgcggaaagccgacgcgcgtccattggtcggctggacgaggggaggagccgctggctcccagccccgccgcgatgagcctcggccgcctttgccgcctactgaagccggcgctgctctgtggggctctggccgcgcctggcctggccgggaccatgtgcgcgtcccgggacgactggcgctgtgcgcgctccatgcacgagttttccgccaaggacatcgacgggcacatggttaacctggacaagtaccggggcttcgtgtgcatcgtcaccaacgtggcctcccagtgaggcaagaccgaagtaaactacactcagctcgtcgacctgcacgcccgatacgctgagtgtggtttgcggatcctggccttcccgtgtaaccagttcgggaagcaggagccagggagtaacgaagagatcaaagagttcgccgcgggctacaacgtcaaattcgatatgttcagcaagatctgcgtgaacggggacgacgcccacccgctgtggaagtggatgaagatccaacccaagggcaagggcatcctgggaaatgccatcaagtggaacttcaccaagttcctcatcgacaagaacggctgcgtggtgaagcgctacggacccatggaggagcccctggtgatagagaaggacctgccccactatttctagctccacaagtgtgtggccccgcccgagcccctgcccacgcccttggagccttccaccggcactcatgacggcctgcctgcaaacctgctggtggggcagacccgaaaatccagcgtgcaccccgccggaggaaggtcccatggcctgctgggcttggctcggcgcccccacccctggctaccttgtgggaataaacagacaaattagaaaaaaaaaaaaaaa

SEQ ID NO: 1282 - DNA, 2152 bp; single-stranded, linear
  immediate source library: GENBANK
  immediate source clone: g31192
gctgctgcccaaggaccgcggagtcggacgcaggcagaccatgtggaccctggtgagctgggtggccttaacagcagggctggtggctggaacgcggtgcccagatggtcagttctgccctgtggcctgctgcctggaccccggaggagccagctacagctgctgccgtccccttctggacaaatggcccacaacactgagcaggcatctgggtggcccctgccaggttgatgcccactgctctgccggccactcctgcatctttaccgtctcagggacttccagttgctgccccttcccagaggccgtggcatgcggggatggccatcactgctgcccacggggcttccactgcagtgcagacgggcgatcctgcttccaaagatcaggtaacaactccgtgggtgccatccagtgccctgatagtcagttcgaatgcccggacttctccacgtgctgtgttatggtcgatggctcctgggggtgctgccccatgccccaggcttcctgctgtgaagacagggtgcactgctgtccgcacggtgccttctgcgacctggttcacacccgctgcatcacacccacgggcacccaccccctggcaaagaagctccctgcccagaggactaacagggcagtggccttgtccagctcggtcatgtgtccggacgcacggtcccggtgccctgatggttctacctgctgtgagctgcccagtgggaagtatggctgctgcccaatgcccaacgccacctgctgctccgatcacctgcactgctgcccccaagacactgtgtgtgacctgatccagagtaagtgcctctccaaggagaacgctaccacggacctcctcactaagctgcctgcgcacacagtgggggatgtgaaatgtgacatggaggtgagctgcccagatggctatacctgctgccgtctacagtcgggggcctggggctgctgcccttttacccaggctgtgtgctgtgaggaccacatacactgctgtcccgcggggtttacgtgtgacacgcagaagggtacctgtgaacaggggccccaccaggtgccctggatggagaaggccccagctcacctcagcctgccagacccacaagccttgaagagagatgtcccctgtgataatgtcagcagctgtccctcctccgatacctgctgccaactcacgtctggggagtggggctgctgtccaatcccagaggctgtctgctgctcggaccaccagcactgctgcccccagggctacacgtgtgtagctgaggggcagtgtcagcgaggaagcgagatcgtggctggactggagaagatgcctgcccgccgggcttccttatcccaccccagagacatcggctgtgaccagcacaccagctgcccggtggggcagacctgctgcccgagcctgggtgggagctgggcctgctgccagttgccccatgctgtgtgctgcgaggatcgccagcactgctgcccggctggctacacctgcaacgtgaaggctcgatcctgcgagaaggaagtggtctctgcccagcctgccaccttcctggcccgtagccctcacgtgggtgtgaaggacgtggagtgtggggaaggacacttctgccatgataaccagacctgctgccgagacaaccgacagggctgggcctgctgtccctaccgccagggcgtctgttgtgctgatcggcgccactgctgtcctgctggcttccgctgcgcagccaggggtaccaagtgtttgcgcagggaggccccgcgctgggacgcccctttgagggacccagccttgagacagctgctgtgagggacagtactgaagactctgcagccctcgggaccccactcggagggtgccctctgctcaggcctccctagcacctccccctaaccaaattctccctggaccccattctgagctccccatcaccatgggaggtggggcctcaatctaaggccttccctgtcagaagggggttgtggcaaaagccacattacaagctgccatcccctccccgtttcagtggaccctgtggccaggtgcttttccctatccacaggggtgtttgtgtgtgtgcgcgtgtgcgtttcaataaagtttgtacactttcaaaaaaaaaaaaaaaaaaaaaaaaaa

SEQ ID NO: 1283 - DNA, 3703 bp; single-stranded, linear
  immediate source library: GENBANK
  immediate source clone: g312141
gaattcttagttgttttctttagaagaacatttctagggaataatacaagaagatttaggaatcattgaagttataaatctttggaatgagcaaactcagaatggtgctacttgaagactctggatctgctgacttcagaagacattttgtcaacctgagtcccttcaccattactgtggtcttacttctcagtgcctgttttgtcaccagttctcttggaggaacagacaaggagctgaggctagtggatggtgaaaacaagtgtagcgggagagtggaagtgaaagtccaggaggagtggggaacggtgtgtaataatggctggagcatggaagcggtctctgtgatttgtaaccagctgggatgtccaactgctatcaaagcccctggatgggctaattccagtgcaggttctggacgcatttggatggatcatgtttcttgtcgtgggaatgagtcagctctttgggattgcaaacatgatggatggggaaagcatagtaactgtactcaccaacaagatgctggagtgacctgctcagatggatccaatttggaaatgaggctgacgcgtggagggaatatgtgttctggaagaatagagatcaaattccaaggacggtggggaacagtgtgtgatgataacttcaacatagatcatgcatctgtcatttgtagacaacttgaatgtggaagtgctgtcagtttctctggttcatctaattttggagaaggctctggaccaatctggtttgatgatcttatatgcaacggaaatgagtcagctctctggaactgcaaacatcaaggatggggaaagcataactgtgatcatgctgaggatgctggagtgatttgctcaaagggagcagatctgagcctgagactggtagatggagtcactgaatgttcaggaagattagaagtgagattccaaggagaatgggggacaatatgtgatgacggctgggacagttacgatgctgctgtggcatgcaagcaactgggatgtccaactgccgtcacagccattggtcgagttaacgccagtaagggatttggacacatctggcttgacagcgtttcttgccagggacatgaacctgctgtctggcaatgtaaacaccatgaatggggaaagcattattgcaatcacaatgaagatgctggcgtgacatgttctgatggatcagatctggagctaagacttagaggtggaggcagccgctgtgctgggacagttgaggtggagattcagagactgttagggaaggtgtgtgacagaggctggggactgaaagaagctgatgtggtttgcaggcagctgggatgtggatctgcactcaaaacatcttatcaagtgtactccaaaatccaggcaacaaacacatggctgtttctaagtagctgtaacggaaatgaaacttctctttgggactgcaagaactggcaatggggtggacttacctgtgatcactatgaagaagccaaaattacctgctcagcccacagggaacccagactggttggaggggacattccctgttctggacgtgttgaagtgaagcatggtgacacgtggggctccatctgtgattcggacttctctctggaagctgccagcgttctatgcagggaattacagtgtggcacagttgtctctatcctggggggagctcactttggagagggaaatggacagatctgggctgaagaattccagtgtgagggacatgagtcccatctttcactctgcccagtagcaccccgcccagaaggaacttgtagccacagcagggatgttggagtagtctgctcaagatacacagaaattcgcttggtgaatggcaagaccccgtgtgagggcagagtggagctcaaaacgcttggtgcctggggatccctctgtaactctcactgggacatagaagatgcccatgttctttgccagcagcttaaatgtggagttgccctttctaccccaggaggagcacgttttggaaaaggaaatggtcagatctggaggcatatgtttcactgcactgggactgagcagcacatgggagattgtcctgtaactgctctaggtgcttcattatgtccttcagagcaagtggcctctgtaatctgctcaggaaaccagtcccaaacactgtcctcgtgcaattcatcgtctttgggcccaacaaggcctaccattccagaagaaagtgctgtggcctgcatagagagtggtcaacttcgcctggtaaatggaggaggtcgctgtgctgggagagtagagatctatcatgagggctcctggggcaccatctgtgatgacagctgggacctgagtgatgcccacgtggtttgcagacagctgggctgtggagaggccattaatgccactggttctgctcattttggggaaggaacagggcccatctggctggatgagatgaaatgcaatggaaaagaatcccgcatttggcagtgccattcacacggctgggggcagcaaaattgcaggcacaaggaggatgcgggagttatctgctcagaattcatgtctctgagactgaccagtgaagccagcagagaggcctgtgcagggcgtctggaagttttttacaatggagcttggggcactgttggcaagagtagcatgtctgaaaccactgtgggtgtggtgtgcaggcagctgggctgtgcagacaaagggaaaatcaaccctgcatctttagacaaggccatgtccattcccatgtgggtggacaatgttcagtgtccaaaaggacctgacacgctgtggcagtgcccatcatctccatgggagaagagactggccagcccctcggaggagacctggatcacatgtgacaacaagataagacttcaggaaggacccacttcctgttctggacgtgtggagatctggcatggaggttcctgggggacagtgtgtgatgactcttgggacttggacgatgctcaggtggtgtgtcaacaacttggctgtggtccagctttgaaagcattcaaagaagcagagtttggtcaggggactggaccgatatggctcaatgaagtgaagtgcaaagggaatgagtcttccttgtgggattgtcctgccagacgctggggccatagtgagtgtgggcacaaggaagacgctgcagtgaattgcacagatatttcagtgcagaaaaccccacaaaaagccacaacaggtcgctcatcccgtcagtcatcctttattgcagtcgggatccttggggttgttctgttggccattttcgtcgcattattcttcttgactaaaaagcgaagacagagacagcggcttgcagtttcctcaagaggagagaacttagtccaccaaattcaataccgggagatgaattcttgcctgaatgcagatgatctggacctaatgaattcctcaggaggccattctgagccacactgaaaaggaaaatgggaatttataacccagtgagttcagcctttaagataccttgatgaagacctggactattgaatggagcagaaattcacctctctcactgactattacagttgcatttttatggagttcttcttctcctaggattcctaagactgctgctgaatttataaaaattaagtttgtgaatgtgactacttagtggtgtatatgagactttcaagggaattaaataaataaataagaatgttaaa

SEQ ID NO: 1284 - DNA, 4950 bp; single-stranded, linear
  immediate source library: GENBANK
  immediate source clone: g312145
gaattcttagttgttttctttagaagaacatttctagggaataatacaagaagatttaggaatcattgaagttataaatctttggaatgagcaaactcagaatggtgctacttgaagactctggatctgctgacttcagaagacattttgtcaacctgagtcccttcaccattactgtggtcttacttctcagtgcctgttttgtcaccagttctcttggaggaacagacaaggagctgaggctagtggatggtgaaaacaagtgtagcgggagagtggaagtgaaagtccaggaggagtggggaacggtgtgtaataatggctggagcatggaagcggtctctgtgatttgtaaccagctgggatgtccaactgctatcaaagcccctggatgggctaattccagtgcaggttctggacgcatttggatggatcatgtttcttgtcgtgggaatgagtcagctctttgggattgcaaacatgatggatggggaaagcatagtaactgtactcaccaacaagatgctggagtgacctgctcagatggatccaatttggaaatgaggctgacgcgtggagggaatatgtgttctggaagaatagagatcaaattccaaggacggtggggaacagtgtgtgatgataacttcaacatagatcatgcatctgtcatttgtagacaacttgaatgtggaagtgctgtcagtttctctggttcatctaattttggagaaggctctggaccaatctggtttgatgatcttatatgcaacggaaatgagtcagctctctggaactgcaaacatcaaggatggggaaagcataactgtgatcatgctgaggatgctggagtgatttgctcaaagggagcagatctgagcctgagactggtagatggagtcactgaatgttcaggaagattagaagtgagattccaaggagaatgggggacaatatgtgatgacggctgggacagttacgatgctgctgtggcatgcaagcaactgggatgtccaactgccgtcacagccattggtcgagttaacgccagtaagggatttggacacatctggcttgacagcgtttcttgccagggacatgaacctgctgtctggcaatgtaaacaccatgaatggggaaagcattattgcaatcacaatgaagatgctggcgtgacatgttctgatggatcagatctggagctaagacttagaggtggaggcagccgctgtgctgggacagttgaggtggagattcagagactgttagggaaggtgtgtgacagaggctggggactgaaagaagctgatgtggtttgcaggcagctgggatgtggatctgcactcaaaacatcttatcaagtgtactccaaaatccaggcaacaaacacatggctgtttctaagtagctgtaacggaaatgaaacttctctttgggactgcaagaactggcaatggggtggacttacctgtgatcactatgaagaagccaaaattacctgctcagcccacagggaacccagactggttggaggggacattccctgttctggacgtgttgaagtgaagcatggtgacacgtggggctccatctgtgattcggacttctctctggaagctgccagcgttctatgcagggaattacagtgtggcacagttgtctctatcctggggggagctcactttggagagggaaatggacagatctgggctgaagaattccagtgtgagggacatgagtcccatctttcactctgcccagtagcaccccgcccagaaggaacttgtagccacagcagggatgttggagtagtctgctcaagatacacagaaattcgcttggtgaatggcaagaccccgtgtgagggcagagtggagctcaaaacgcttggtgcctggggatccctctgtaactctcactgggacatagaagatgcccatgttctttgccagcagcttaaatgtggagttgccctttctaccccaggaggagcacgttttggaaaaggaaatggtcagatctggaggcatatgtttcactgcactgggactgagcagcacatgggagattgtcctgtaactgctctaggtgcttcattatgtccttcagagcaagtggcctctgtaatctgctcaggaaaccagtcccaaacactgtcctcgtgcaattcatcgtctttgggcccaacaaggcctaccattccagaagaaagtgctgtggcctgcatagagagtggtcaacttcgcctggtaaatggaggaggtcgctgtgctgggagagtagagatctatcatgagggctcctggggcaccatctgtgatgacagctgggacctgagtgatgcccacgtggtttgcagacagctgggctgtggagaggccattaatgccactggttctgctcattttggggaaggaacagggcccatctggctggatgagatgaaatgcaatggaaaagaatcccgcatttggcagtgccattcacacggctgggggcagcaaaattgcaggcacaaggaggatgcgggagttatctgctcagaattcatgtctctgagactgaccagtgaagccagcagagaggcctgtgcagggcgtctggaagttttttacaatggagcttggggcactgttggcaagagtagcatgtctgaaaccactgtgggtgtggtgtgcaggcagctgggctgtgcagacaaagggaaaatcaaccctgcatctttagacaaggccatgtccattcccatgtgggtggacaatgttcagtgtccaaaaggacctgacacgctgtggcagtgcccatcatctccatgggagaagagactggccagcccctcggaggagacctggatcacatgtgacaacaagataagacttcaggaaggacccacttcctgttctggacgtgtggagatctggcatggaggttcctgggggacagtgtgtgatgactcttgggacttggacgatgctcaggtggtgtgtcaacaacttggctgtggtccagctttgaaagcattcaaagaagcagagtttggtcaggggactggaccgatatggctcaatgaagtgaagtgcaaagggaatgagtcttccttgtgggattgtcctgccagacgctggggccatagtgagtgtgggcacaaggaagacgctgcagtgaattgcacagatatttcagtgcagaaaaccccacaaaaagccacaacaggtcgctcatcccgtcagtcatcctttattgcagtcgggatccttggggttgttctgttggccattttcgtcgcattattcttcttgactaaaaagcgaagacagagacagcggcttgcagtttcctcaagaggagagaacttagtccaccaaattcaataccgggagatgaattcttgcctgaatgcagatgatctggacctaatgaattcctcaggtctgtgggttcttggagggtctattgcccaggggttcagatcagtggctgcagttgaggcacagacattctactttgataaacagttaaaaaagtctaaaaatgtaataggaagcttagatgcatataatggacaagaatgactgaaaattattcttggagaatatcaaaattgcaatcatagggaggcctttagcttaagaggcctgtgattattcctgatagaggtatggaaagaaccatgcagaggaatattatgacttggacctcattttattaaaacagaaattaatcttacaaaagattgtcataagtgacagtttaacttttttctttaaattttgttgtgtatatttaaggtatacaacatgattttatgggatgtatatagatagtaaaaagcttactaaagcaaagcaaatgaacacacccatcatctgacatagttacccttttttgtgttgttcttgtggcaagagcagctaaaacctactcacttagcatgaatcctacatacagcacaatgttattacctataatcctcatgttgtacattagacctctagactggttcattctacgtatctgctactttgtatcctctgacctacatacgtctttcacagtttcttccattcccatttcctgtcattttttttctctagcttgatatttattatatttttccctaaaagtctaaaaccttaaactttcaatatctttattgcatgagaagccatacaaatccacagaactagccttatttctcatcacatcatgctgttttatccttgaacttctatttagcaccagtgcactaattctgcatctgggcaggatgactttactgggttggaagaaatatcccaaaacccattgtctttactccatgaagggtccctgaccttctgagaggggcctgcctcacttcttccatccaaagaattatgcatctgctactgtgtcagggaacatatttaaggaacatgtactgttactgtgtcaggaaacatatttaagaaataggaaagactttctctgccccttaaatcacacatgcttttcttcctagttatgggtggtgtttttagttgctcaaagagcctcacagttacgtgagaagaggtctggtttatttcccagtaattattttcttcctttcagaaaattcccatgagtcagctgatttcagtgctgctgaactaatttctgtgtctaaatttcttcctatttctggaatggaaaaggaggccattctgagccacactgaaaaggaaaatgggaatttataacccagtgagttcagcctttaagataccttgatgaagacctggactattgaatggagcagaaattcacctctctcactgactattacagttgcatttttatggagttcttcttctcctaggattcctaagactgctgctgaatttataaaaattaagtttgtgaatgtgactacttagtggtgtatatgagactttcaagggaattaaataaataaataagaatgttaaa

SEQ ID NO: 1285 - DNA, 2560 bp; single-stranded, linear
  immediate source library: GENBANK
  immediate source clone: g312466
cgtatgtctccagggccagtgtctgctgcgatcgagtcccaccttccaagtcctggcatctcaatgcatctgggaagctacctgcattaagtcaggactgagcacacaggtgaactccagaaagaagaagctatggccgcagtgattctggagagcatctttctgaagcgatcccaacagaaaaagaaaacatcacctctaaacttcaagaagcgcctgtttctcttgaccgtgcacaaactctcctactatgagtatgactttgaacgtgggagaagaggcagtaagaagggttcaatagatgttgagaagatcacttgtgttgaaacagtggttcctgaaaaaaatcctcctccagaaagacagattccgagaagaggtgaagagtccagtgaaatggagcaaatttcaatcattgaaaggttcccttatcccttccaggttgtatatgatgaagggcctctctacgtcttctccccaactgaagaactaaggaagcggtggattcaccagctcaaaaacgtaatccggtacaacagtgatctggttcagaaatatcacccttgcttctggatcgatgggcagtatctctgctgctctcagacagccaaaaatgctatgggctgccaaattttggagaacaggaatggaagcttaaaacctgggagttctcaccggaagacaaaaaagcctcttcccccaacgcctgaggaggaccagatcttgaaaaagccactaccgcctgagccagcagcagcaccagtctccacaagtgagctgaaaaaggttgtggccctttatgattacatgccaatgaatgcaaatgatctacagctgcggaagggtgatgaatattttatcttggaggaaagcaacttaccatggtggagagcacgagataaaaatgggcaggaaggctacattcctagtaactatgtcactgaagcagaagactccatagaaatgtatgagtggtattccaaacacatgactcggagtcaggctgagcaactgctaaagcaagaggggaaagaaggaggtttcattgtcagagactccagcaaagctggcaaatatacagtgtctgtgtttgctaaatccacaggggaccctcaaggggtgatacgtcattatgttgtgtgttccacacctcagagccagtattacctggctgagaagcaccttttcagcaccatccctgagctcattaactaccatcagcacaactctgcaggactcatatccaggctcaaatatccagtgtctcaacaaaacaagaatgcaccttccactgcaggcctgggatacggatcatgggaaattgatccaaaggacctgaccttcttgaaggagctggggactggacaatttggggtagtgaagtatgggaaatggagaggccagtacgacgtggccatcaagatgatcaaagaaggctccatgtctgaagatgaattcattgaagaagccaaagtcatgatgaatctttcccatgagaagctggtgcagttgtatggcgtctgcaccaagcagcgccccatcttcatcatcactgagtacatggccaatggctgcctcctgaactacctgagggagatgcgccaccgcttccagactcagcagctgctagagatgtgcaaggatgtctgtgaagccatggaatacctggagtcaaagcagttccttcaccgagacctggcagctcgaaactgtttggtaaacgatcaaggagttgttaaagtatctgatttcggcctgtccaggtatgtcctggatgatgaatacacaagctcagtaggctccaaatttccagtccggtggtccccaccggaagtcctgatgtatagcaagttcagcagcaaatctgacatttgggcttttggggttttgatgtgggaaatttactccctggggaagatgccatatgagagatttactaacagtgagactgctgaacacattgcccaaggcctacgtctctacaggcctcatctggcttcagagaaggtatataccatcatgtacagttgttggcatgagaaagcagatgagcgtcccactttcaaaattcttctgagcaatattctagatgtcatggatgaagaatcctgagctcgccaataagcttcttggttctacttctcttctccacaagccccaatttcactttctcagaggaaatcccaagcttaggagccctggagcctttgtgctcccactcaatacaaaaaggcccctctctacatctggggatgcacctcttctttgattccctgggatagtggcttctgagcaaaggccaaaaaattattgtgcctgaaatttcccgagagaattaagacagactgaatttgcgatgaaaatattttttaggagggaggatgtaaatagccgcacaaaggggtccaacagctctttgagtaggcatttggtagagcttgggggtgtgtgtgtgggggtggaccgaatttggcaagaatgaaatggtgtcataaagatgggaggggagggtgttttgataaaataaattctagaaagcttaaaaaaaaaaaaaaaaaaa

SEQ ID NO: 1286 - DNA, 4485 bp; single-stranded, linear
  immediate source library: GENBANK
  immediate source clone: g31296
gagcccccggagaggcgggagcggtgttggcgttttggttctttttgttcattgagcgcaggcagctatgtcttcttcaaaggagaggagcaaagctttaatgtgtgccgaccatttccttcagtgctggacaggctgctgtgaagggacatcaccttttcgctttttccaagatggctcaagattcagtagatctttcttgtgattatcagttttggatgcagaagctttctgtatgggatcaggcttccactttggaaacccagcaagacacctgtcttcacgtggctcagttccaggagttcctaaggaagatgtatgaagccttgaaagagatggattctaatacagtcattgaaagattccccacaattggtcaactgttggcaaaagcttgttggaatccttttattttagcatatgatgaaagccaaaaaattctaatatggtgcttatgttgtctaattaacaaagaaccacagaattctggacaatcaaaacttaactcctggatacagggtgtattatctcatatactttcagcactcagatttgataaagaagttgctcttttcactcaaggtcttgggtatgcacctatagattactatcctggtttgcttaaaaatatggttttatcattagcgtctgaactcagagagaatcatcttaatggatttaacactcaaaggcgaatggctcccgagcgagtggcgtccctgtcacgagtttgtgtcccacttattaccctgacagatgttgaccccctggtggaggctctcctcatctgtcatggacgtgaacctcaggaaatcctccagccagagttctttgaggctgtaaacgaggccattttgctgaagaagatttctctccccatgtcagctgtagtctgcctctggcttcggcaccttcccagccttgaaaaagcaatgctgcatctttttgaaaagctaatctccagtgagagaaattgtctgagaaggatcgaatgctttataaaagattcatcgctgcctcaagcagcctgccaccctgccatattccgggttgttgatgagatgttcaggtgtgcactcctggaaaccgatggggccctggaaatcatagccactattcaggtgtttacgcagtgctttgtagaagctctggagaaagcaagcaagcagctgcggtttgcactcaagacctactttccttacacttctccatctcttgccatggtgctgctgcaagaccctcaagatatccctcggggacactggctccagacactgaagcatatttctgaactgctcagagaagcagttgaagaccagactcatgggtcctgcggaggtccctttgagagctggttcctgttcattcacttcggaggatgggctgagatggtggcagagcaattactgatgtcggcagccgaaccccccacggccctgctgtggctcttggccttctactacggcccccgtgatgggaggcagagagcacagactatggtccaggtgaaggccgtgctgggccacctcctggcaatgtccagaagcagcagcctctcagcccaggacctgcagacggtagcaggacagggcacagacacagacctcagagctcctgcacaacagctgatcaggcaccttctcctcaacttcctgctctgggctcctggaggccacacgatcgcctgggatgtcatcaccctgatggctcacactgctgagataactcacgagatcattggctttcttgaccagaccttgtacagatggaatcgtcttggcattgaaagccctagatcagaaaaactggcccgagagctccttaaagagctgcgaactcaagtctagaaggcacgcaggccgtgtgggtgcccggcgtgagggatcaggctcgccagggccacaggacaggtgatgacctgtggccacgcatttgtggagtaagtgccctcgctgggctgtgagaatgagctgtacacatcttgggacaatctgctagtatctattttacaaaatgcagagccaggtccctcagcccagactcagtcagacatgttcactaatgactcaagtgagcttcggtactcctggtgcccgcccggccagaccgtcagcttgataattactaaagcaaaggcctgggtgggagaacaggtttctagtttttacccaagtcaagctgcacatctattatttaaaaattcaaagtcttagaaccaagaatttggtcatgaaccattaaagaatttagagagaacttagctctttttagactctttttaggagtcagggatctgggataaagccacactgtcttgctgtatggagaaattcttcaaggggagtcagggtccctcaggcttcccttgtgtctccctggacctgcctgacaggccacaggagcagacagcacacccaagcccgggcctccggcacactctttccactctgtatttgctaaatgatgctaactgctaccaaaaggcccttgggacatcagaggagccggcagcgaaggtagaggatgtgttccagaaacattagaaggcaggattaattcagttagttagtctcttgttaaatggaaatgggaattggaaattcctgataaagaattggcctggctgggtgcagtggctcacacctgtgatcccagcactttgggaggccaaggcagggggattacttcagcccaggagttccagactgcctggctaacatggcaataccctatctctactaaaaatacaaaaattatcggggtgcaatggcatgcatctgtaacccagctattcaagaggctgaggcatgaggatctcttgaacccgggaggtgggagttgtagtgagccgagatcatgacactgcactccagcctgggcaacagagcgagaccatctcttaaaaaaaggcattgttagtgtaactcaaggttaacatttatttcatgtcagtacagggtgctttttcctttcagggacattctggaattgtattggttgtacattcttttgtgtctattctgtttgtcaagtgagtcaagacttgcttttgtccattttgatttgtgtgtattagtctgagtcttggctccgttttgaggtatgagcaaagttttgctggatagagttaacctttagggaaattccttattttggtatgtggcaatgctaatagatccactgaagatctggaaaattccaggaactttttcacctgagcctttcttctgagaaatgctgcagtcagaagggtgtgctggtaaagtattttggtggcagctgccatcatggtcattgccttcatataacatgcttcgtgctcatggtcattgccttcatataacatgcttcgtgccatcatgatccttgccttcatataacaaacatgcttcgtcagaggtgttggggttgaaaaaggagctgcatgcttcactggagttgagggcctctcctgtctgactttaagccagaacttgtggctgggccatggaagctgtgactcctctgtggacatggtggcagcagggaacccctagagagaggggccactgggaccaggcctcctgttgtggagggactcctgggacagtcctccaccctgtcctgtggtcctgtgtacagggttggcctcttcctcctcccctgccaggcctctgcccatgccccttccttccttctcctgggactggtgaagctaggcatctggaagacttcttcctagcctggaagccctgacctcggcccatctgcagaatctcccagttccttcacagctgccgagtcctctcacgggtgcggtggaggcggccttgcggtggtgctttctgggcagccaggggttcctgggtgggaggactgtccctctggggacgtggcactgaagtgcctgctggcttcatgtggccctttgccctttcccagcctgagagatgctcaaaggtggggagctgggggagccacccctcggccattccctccacctccaagacaggtggcggccgggcaggcactcttaagcccacctccccctcttgttgccttcgatttcggcaaagcctgggcaggtgccaccgggaaggaatggcatcgagatgctgggcggggacgcggcgtggcgagggggcttgacggcgttggcggggctgggcacaggggcagccgcagggaggcagggatggcaaggcgtgaagccaccctggaaggaactggaccaaggtcttcagaggtgcgacagggtctggaatctgaccttactctagcaggagtttttgtagactctccctgatagtttagtttttgataaagcatgctggtaaaaccactaccctcagagagagccaaaaatacagaagaggcggagagcgcccctccaaccaggctgttattcccctggactccgtgacatctgtggaattttttagctctttaaaatctgtaatttgttgtctattttttcattctaaataaaacttcagtttgcaccta

SEQ ID NO: 1287 - DNA, 887 bp; single-stranded, linear
  immediate source library: GENBANK
  immediate source clone: g31323
tctttggtgacttgtccactccagtgtggcatcatgtggcagctgctcctcccaactgctctgctacttctagtttcagctggcatgcggactgaagatctcccaaaggctgtggtgttcctggagcctcaatggtacagggtgctcgagaaggacagtgtgactctgaagtgccagggagcctactcccctgaggacaattccacacagtggtttcacaatgagagcctcatctcaagccaggcctcgagctacttcattgacgctgccacagtcgacgacagtggagagtacaggtgccagacaaacctctccaccctcagtgacccggtgcagctagaagtccatatcggctggctgttgctccaggcccctcggtgggtgttcaaggaggaagaccctattcacctgaggtgtcacagctggaagaacactgctctgcataaggtcacatatttacagaatggcaaaggcaggaagtattttcatcataattctgacttctacattccaaaagccacactcaaagacagcggctcctacttctgcagggggctttttgggagtaaaaatgtgtcttcagagactgtgaacatcaccatcactcaaggtttggcagtgtcaaccatctcatcattctttccacctgggtaccaagtctctttctgcttggtgatggtactcctttttgcagtggacacaggactatatttctctgtgaagacaaacattcgaagctcaacaagagactggaaggaccataaatttaaatggagaaaggaccctcaagacaaatgacccccatcccatgggggtaataagagcagtagcagcagcatctctgaacatttctctggatttgcaaccccatcatcctcaggcctctc

SEQ ID NO: 1288 - DNA, 2360 bp; single-stranded, linear
  immediate source library: GENBANK
  immediate source clone: g31386
agccggggacgcacacgcccgctcgcacaagccacggcggactctcccgaggcggaacctccacgccgagcgagggtcagtttgaaaaggaggatcgagctcactgtggagtatccatggagatgtggagccttgtcaccaacctctaactgcagaactgggatgtggagctggaagtgcctcctcttctgggctgtgctggtcacagccacactctgcaccgctaggccgtccccgaccttgcctgaacaagatgctctcccctcctcggaggatgatgatgatgatgatgactcctcttcagaggagaaagaaacagataacaccaaaccaaaccccgtagctccatattggacatccccagaaaagatggaaaagaaattgcatgcagtgccggctgccaagacagtgaagttcaaatgcccttccagtgggaccccaaaccccacactgcgctggttgaaaaatggcaaagaattcaaacctgaccacagaattggaggctacaaggtccgttatgccacctggagcatcataatggactctgtggtgccctctgacaagggcaactacacctgcattgtggagaatgagtacggcagcatcaaccacacataccagctggatgtcgtggagcggtcccctcaccggcccatcctgcaagcagggttgcccgccaacaaaacagtggccctgggtagcaacgtggagttcatgtgtaaggtgtacagtgacccgcagccgcacatccagtggctaaagcacatcgaggtgaatgggagcaagattggcccagacaacctgccttatgtccagatcttgaagactgctggagttaataccaccgacaaagagatggaggtgcttcacttaagaaatgtctcctttgaggacgcaggggagtatacgtgcttggcgggtaactctatcggactctcccatcactctgcatggttgaccgttctggaagccctggaagagaggccggcagtgatgacctcgcccctgtacctggagatcatcatctattgcacaggggccttcctcatctcctgcatggtggggtcggtcatcgtctacaagatgaagagtggtaccaagaagagtgacttccacagccagatggctgtgcacaagctggccaagagcatccctctgcgcagacaggtaacagtgtctgctgactccagtgcatccatgaactctggggttcttctggttcggccatcacggctctcctccagtgggactcccatgctagcaggggtctctgagtatgagcttcccgaagaccctcgctgggagctgcctcgggacagactggtcttaggcaaacccctgggagagggctgctttgggcaggtggtgttggcagaggctatcgggctggacaaggacaaacccaaccgtgtgaccaaagtggctgtgaagatgttgaagtcggacgcaacagagaaagacttgtcagacctgatctcagaaatggagatgatgaagatgatcgggaagcataagaatatcatcaacctgctgggggcctgcacgcaggatggtcccttgtatgtcatcgtggagtatgcctccaagggcaacctgcgggagtacctgcaggcccggaggcccccagggctggaatactgctacaaccccagccacaacccagaggagcagctctcctccaaggacctggtgtcctgcgcctaccaggtggcccgaggcatggagtatctggcctccaagaagtgcatacaccgagacctggcagccaggaatgtcctggtgacagaggacaatgtgatgaagatagcagactttggcctcgcacgggacattcaccacatcgactactataaaaagacaaccaacggccgactgcctgtgaagtggatggcacccgaggcattatttgaccggatctacacccaccagagtgatgtgtggtctttcggggtgctcctgtgggagatcttcactctgggcggctccccataccccggtgtgcctgtggaggaacttttcaagctgctgaaggagggtcaccgcatggacaagcccagtaactgcaccaacgagctgtacatgatgatgcgggactgctggcatgcagtgccctcacagagacccaccttcaagcagctggtggaagacctggaccgcatcgtggccttgacctccaaccaggagtacctggacctgtccatgcccctggaccagtactcccccagctttcccgacacccggagctctacgtgctcctcaggggaggattccgtcttctctcatgagccgctgcccgaggagccctgcctgccccgacacccagcccagcttgccaatggcggactcaaacgccgctgact

SEQ ID NO: 1289 - DNA, 7680 bp; single-stranded, linear
  immediate source library: GENBANK
  immediate source clone: g31396
gaagagcaagaggcaggctcagcaaatggttcagccccagtccccggtggctgtcagtcaaagcaagcccggttgttatgacaatggaaaacactatcagataaatcaacagtgggagcggacctacctaggtaatgtgttggtttgtacttgttatggaggaagccgaggttttaactgcgaaagtaaacctgaagctgaagagacttgctttgacaagtacactgggaacacttaccgagtgggtgacacttatgagcgtcctaaagactccatgatctgggactgtacctgcatcggggctgggcgagggagaataagctgtaccatcgcaaaccgctgccatgaagggggtcagtcctacaagattggtgacacctggaggagaccacatgagactggtggttacatgttagagtgtgtgtgtcttggtaatggaaaaggagaatggacctgcaagcccatagctgagaagtgttttgatcatgctgctgggacttcctatgtggtcggagaaacgtgggagaagccctaccaaggctggatgatggtagattgtacttgcctgggagaaggcagcggacgcatcacttgcacttctagaaatagatgcaacgatcaggacacaaggacatcctatagaattggagacacctggagcaagaaggataatcgaggaaacctgctccagtgcatctgcacaggcaacggccgaggagagtggaagtgtgagaggcacacctctgtgcagaccacatcgagcggatctggccccttcaccgatgttcgtgcagctgtttaccaaccgcagcctcacccccagcctcctccctatggccactgtgtcacagacagtggtgtggtctactctgtggggatgcagtggttgaagacacaaggaaataagcaaatgctttgcacgtgcctgggcaacggagtcagctgccaagagacagctgtaacccagacttacggtggcaacttaaatggagagccatgtgtcttaccattcacctacaatggcaggacgttctactcctgcaccacggaagggcgacaggacggacatctttggtgcagcacaacttcgaattatgagcaggaccagaaatactctttctgcacagaccacactgttttggttcagactcaaggaggaaattccaatggtgccttgtgccacttccccttcctatacaacaaccacaattacactgattgcacttctgagggcagaagagacaacatgaagtggtgtgggaccacacagaactatgatgccgaccagaagtttgggttctgccccatggctgcccacgaggaaatctgcacaaccaatgaaggggtcatgtaccgcattggagatcagtgggataagcagcatgacatgggtcacatgatgaggtgcacgtgtgttgggaatggtcgtggggaatggacatgcattgcctactcgcaacttcgagatcagtgcattgttgatgacatcacttacaatgtgaacgacacattccacaagcgtcatgaagaggggcacatgctgaactgtacatgcttcggtcagggtcggggcaggtggaagtgtgatcccgtcgaccaatgccaggattcagagactgggacgttttatcaaattggagattcatgggagaagtatgtgcatggtgtcagataccagtgctactgctatggccgtggcattggggagtggcattgccaacctttacagacctatccaagctcaagtggtcctgtcgaagtatttatcactgagactccgagtcagcccaactcccaccccatccagtggaatgcaccacagccatctcacatttccaagtacattctcaggtggagacctaaaaattctgtaggccgttggaaggaagctaccataccaggccacttaaactcctacaccatcaaaggcctgaagcctggtgtggtatacgagggccagctcatcagcatccagcagtacggccaccaagaagtgactcgctttgacttcaccaccaccagcaccagcacacctgtgaccagcaacaccgtgacaggagagacgactcccttttctcctcttgtggccacttctgaatctgtgaccgaaatcacagccagtagctttgtggtctcctgggtctcagcttccgacaccgtgtcgggattccgggtggaatatgagctgagtgaggagggagatgagccacagtacctggatcttccaagcacagccacttctgtgaacatccctgacctgcttcctggccgaaaatacattgtaaatgtctatcagatatctgaggatggggagcagagtttgatcctgtctacttcacaaacaacagcgcctgatgcccctcctgacccgactgtggaccaagttgatgacacctcaattgttgttcgctggagcagaccccaggctcccatcacagggtacagaatagtctattcgccatcagtagaaggtagcagcacagaactcaaccttcctgaaactgcaaactccgtcaccctcagtgacttgcaacctggtgttcagtataacatcactatctatgctgtggaagaaaatcaagaaagtacacctgttgtcattcaacaagaaaccactggcaccccacgctcagatacagtgccctctcccagggacctgcagtttgtggaagtgacagacgtgaaggtcaccatcatgtggacaccgcctgagagtgcagtgaccggctaccgtgtggatgtgatccccgtcaacctgcctggcgagcacgggcagaggctgcccatcagcaggaacacctttgcagaagtcaccgggctgtcccctggggtcacctattacttcaaagtctttgcagtgagccatgggagggagagcaagcctctgactgctcaacagacaaccaaactggatgctcccactaacctccagtttgtcaatgaaactgattctactgtcctggtgagatggactccacctcgggcccagataacaggataccgactgaccgtgggccttacccgaagaggccagcccaggcagtacaatgtgggtccctctgtctccaagtaccccctgaggaatctgcagcctgcatctgagtacaccgtatccctcgtggccataaagggcaaccaagagagccccaaagccactggagtctttaccacactgcagcctgggagctctattccaccttacaacaccgaggtgactgagaccaccatcgtgatcacatggacgcctgctccaagaattggttttaagctgggtgtacgaccaagccagggaggagaggcaccacgagaagtgacttcagactcaggaagcatcgttgtgtccggcttgactccaggagtagaatacgtctacaccatccaagtcctgagagatggacaggaaagagatgcgccaattgtaaacaaagtggtgacaccattgtctccaccaacaaacttgcatctggaggcaaaccctgacactggagtgctcacagtctcctgggagaggagcaccaccccagacattactggttatagaattaccacaacccctacaaacggccagcagggaaattctttggaagaagtggtccatgctgatcagagctcctgcacttttgataacctgagtcccggcctggagtacaatgtcagtgtttacactgtcaaggatgacaaggaaagtgtccctatctctgataccatcatcccagctgttcctcctcccactgacctgcgattcaccaacattggtccagacaccatgcgtgtcacctgggctccacccccatccattgatttaaccaacttcctggtgcgttactcacctgtgaaaaatgaggaagatgttgcagagttgtcaatttctccttcagacaatgcagtggtcttaacaaatctcctgcctggtacagaatatgtagtgagtgtctccagtgtctacgaacaacatgagagcacacctcttagaggaagacagaaaacaggtcttgattccccaactggcattgacttttctgatattactgccaactcttttactgtgcactggattgctcctcgagccaccatcactggctacaggatccgccatcatcccgagcacttcagtgggagacctcgagaagatcgggtgccccactctcggaattccatcaccctcaccaacctcactccaggcacagagtatgtggtcagcatcgttgctcttaatggcagagaggaaagtcccttattgattggccaacaatcaacagtttctgatgttccgagggacctggaagttgttgctgcgacccccaccagcctactgatcagctgggatgctcctgctgtcacagtgagatattacaggatcacttacggagaaacaggaggaaatagccctgtccaggagttcactgtgcctgggagcaagtctacagctaccatcagcggccttaaacctggagttgattataccatcactgtgtatgctgtcactggccgtggagacagccccgcaagcagcaagccaatttccattaattaccgaacagaaattgacaaaccatcccagatgcaagtgaccgatgttcaggacaacagcattagtgtcaagtggctgccttcaagttcccctgttactggttacagagtaaccaccactcccaaaaatggaccaggaccaacaaaaactaaaactgcaggtccagatcaaacagaaatgactattgaaggcttgcagcccacagtggagtatgtggttagtgtctatgctcagaatccaagcggagagagtcagcctctggttcagactgcagtaaccaacattgatcgccctaaaggactggcattcactgatgtggatgtcgattccatcaaaattgcttgggaaagcccacaggggcaagtttccaggtacagggtgacctactcgagccctgaggatggaatccatgagctattccctgcacctgatggtgaagaagacactgcagagctgcaaggcctcagaccgggttctgagtacacagtcagtgtggttgccttgcacgatgatatggagagccagcccctgattggaacccagtccacagctattcctgcaccaactgacctgaagttcactcaggtcacacccacaagcctgagcgcccagtggacaccacccaatgttcagctcactggatatcgagtgcgggtgacccccaaggagaagaccggaccaatgaaagaaatcaaccttgctcctgacagctcatccgtggttgtatcaggacttatggtggccaccaaatatgaagtgagtgtctatgctcttaaggacactttgacaagcagaccagctcagggtgttgtcaccactctggagaatgtcagcccaccaagaagggctcgtgtgacagatgctactgagaccaccatcaccattagctggagaaccaagactgagacgatcactggcttccaagttgatgccgttccagccaatggccagactccaatccagagaaccatcaagccagatgtcagaagctacaccatcacaggtttacaaccaggcactgactacaagatctacctgtacaccttgaatgacaatgctcggagctcccctgtggtcatcgacgcctccactgccattgatgcaccatccaacctgcgtttcctggccaccacacccaattccttgctggtatcatggcagccgccacgtgccaggattaccggctacatcatcaagtatgagaagcctgggtctcctcccagagaagtggtccctcggccccgccctggtgtcacagaggctactattactggcctggaaccgggaaccgaatatacaatttatgtcattgccctgaagaataatcagaagagcgagcccctgattggaaggaaaaagacagacgagcttccccaactggtaacccttccacaccccaatcttcatggaccagagatcttggatgttccttccacagttcaaaagacccctttcgtcacccaccctgggtatgacactggaaatggtattcagcttcctggcacttctggtcagcaacccagtgttgggcaacaaatgatctttgaggaacatggttttaggcggaccacaccgcccacaacggccacccccataaggcataggccaagaccatacccgccgaatgtaggacaagaagctctctctcagacaaccatctcatgggccccattccaggacacttctgagtacatcatttcatgtcatcctgttggcactgatgaagaacccttacagttcagggttcctggaacttctaccagtgccactctgacaggcctcaccagaggtgccacctacaacatcatagtggaggcactgaaagaccagcagaggcataaggttcgggaagaggttgttaccgtgggcaactctgtcaacgaaggcttgaaccaacctacggatgactcgtgctttgacccctacacagtttcccattatgccgttggagatgagtgggaacgaatgtctgaatcaggctttaaactgttgtgccagtgcttaggctttggaagtggtcatttcagatgtgattcatctagatggtgccatgacaatggtgtgaactacaagattggagagaagtgggaccgtcagggagaaaatggccagatgatgagctgcacatgtcttgggaacggaaaaggagaattcaagtgtgaccctcatgaggcaacgtgttacgatgatgggaagacataccacgtaggagaacagtggcagaaggaatatctcggtgccatttgctcctgcacatgctttggaggccagcggggctggcgctgtgacaactgccgcagacctgggggtgaacccagtcccgaaggcactactggccagtcctacaaccagtattctcagagataccatcagagaacaaacactaatgttaattgcccaattgagtgcttcatgcctttagatgtacaggctgacagagaagattcccgagagtaaatcatctttccaatccagaggaacaagcatgtctctctgccaagatccatctaaactggagtgatgttagcagacccagcttagagttcttctttctttcttaagccctttgctctggaggaagttctccagcttcagctcaactcacagcttctccaagcatcaccctgggagtttcctgagggttttctcataaatgagggctgcacattgcctgttctgcttcgaagtattcaataccgctcagtattttaaatgaagtgattctaagatttggtttgggatcaataggaaagcatatgcagccaaccaagatgcaaatgttttgaaatgatatgaccaaaattttaagtaggaaagtcacccaaacacttctgctttcacttaagtgtctggcccgcaatactgtaggaacaagcatgatcttgttactgtgatattttaaatatccacagtactcactttttccaaatgatcctagtaattgcctagaaatatctttctcttacctgttatttatcaatttttcccagtatttttatacggaaaaaattgtattgaaaacacttagtatgcagttgataagaggaatttggtataattatggtgggtgattattttttatactgtatgtgccaaagctttactactgtggaaagacaactgttttaataaaagatttacattccaca

SEQ ID NO: 1290 - DNA, 5133 bp; single-stranded, linear
  immediate source library: GENBANK
  immediate source clone: g31421
cctctttcaccctgtctaggttgccagcaaatcccacgggcctcctgacgctgcccctggggccacaggtccctcgagtgctggaaggatgaaggattcctgcatcactgtgatggccatggcgctgctgtctgggttctttttcttcgcgccggcctcgagctacaacctggacgtgcggggcgcgcggagcttctccccaccgcgcgccgggaggcactttggataccgcgtcctgcaggtcggaaacggggtcatcgtgggagctccaggggaggggaacagcacaggaagcctctatcagtgccagtcgggcacaggacactgcctgccagtcaccctgagaggttccaactatacctccaagtacttgggaatgaccttggcaacagaccccacagatggaagcattttggcctgtgaccctgggctgtctcgaacgtgtgaccagaacacctatctgagtggcctgtgttacctcttccgccagaatctgcagggtcccatgctgcaggggcgccctggttttcaggaatgtatcaagggcaacgtagacctggtatttctgtttgatggttcgatgagcttgcagccagatgaatttcagaaaattctggacttcatgaaggatgtgatgaagaaactcagcaacacttcgtaccagtttgctgctgttcagttttccacaagctacaaaacagaatttgatttctcagattatgttaaatggaaggaccctgatgctctgctgaagcatgtaaagcacatgttgctgttgaccaatacctttggtgccatcaattatgtcgcgacagaggtgttccgggaggagctgggggcccggccagatgccaccaaagtgcttatcatcatcacggatggggaggccactgacagtggcaacatcgatgcggccaaagacatcatccgctacatcatcgggattggaaagcattttcagaccaaggagagtcaggagaccctccacaaatttgcatcaaaacccgcgagcgagtttgtgaaaattctggacacatttgagaagctgaaagatctattcactgagctgcagaagaagatctatgtcattgagggcacaagcaaacaggacctgacttccttcaacatggagctgtcctccagcggcatcagtgctgacctcagcaggggccatgcagtcgtgggggcagtaggagccaaggactgggctgggggctttcttgacctgaaggcagacctgcaggatgacacatttattgggaatgaaccattgacaccagaagtgagagcaggctatttgggttacaccgtgacctggctgccctcccggcaaaagacttcgttgctggcctcgggagcccctcgataccagcacatgggccgagtgctgctgttccaagagccacagggcggaggacactggagccaggtccagacaatccatgggacccagattggctcttatttcggtggggagctgtgtggcgtcgacgtggaccaagatggggagacagagctgctgctgattggtgccccactgttctatggggagcagagaggaggccgggtgtttatctaccagagaagacagttggggtttgaagaagtctcagagctgcagggggaccccggctacccactcgggcggtttggagaagccatcactgctctgacagacatcaacggcgatgggctggtagacgtggctgtgggggcccctctggaggagcagggggctgtgtacatcttcaatgggaggcacggggggcttagtccccagccaagtcagcggatagaagggacccaagtgctctcaggaattcagtggtttggacgctccatccatggggtgaaggaccttgaaggggatggcttggcagatgtggctgtgggggctgagagccagatgatcgtgctgagctcccggcccgtggtggatatggtcaccctgatgtccttctctccagctgagatcccagtgcatgaagtggagtgctcctattcaaccagtaacaagatgaaagaaggagttaatatcacaatctgtttccagatcaagtctctctacccccagttccaaggccgcctggttgccaatctcacttacactctgcagctggatggccaccggaccagaagacgggggttgttcccaggagggagacatgaactcagaaggaatatagctgtcaccaccagcatgtcatgcactgacttctcatttcatttcccggtatgtgttcaagacctcatctcccccatcaatgtttccctgaatttctctctttgggaggaggaagggacaccgagggaccaaagggcgcagggcaaggacataccgcccatcctgagaccctccctgcactcggaaacctgggagatcccttttgagaagaactgtggggaggacaagaagtgtgaggcaaacttgagagtgtccttctctcctgcaagatccagagccctgcgtctaactgcttttgccagcctctctgtggagctgagcctgagtaacttggaagaagatgcttactgggtccagctggacctgcacttccccccgggactctccttccgcaaggtggagatgctgaagccccatagccagatacctgtgagctgcgaggagcttcctgaagagtccaggcttctgtccagggcattatcttgcaatgtgagctctcccatcttcaaagcaggccactcggttgctctgcagatgatgtttaatacactggtaaacagctcctggggggactcggttgaattgcacgccaatgtgacctgtaacaatgaggactcagacctcctggaggacaactcagccactaccatcatccccatcctgtaccccatcaacatcctcatccaggaccaagaagactccacactctatgtcagtttcacccccaaaggccccaagatccaccaagtcaagcacatgtaccaggtgaggatccagccttccatccacgaccacaacatacccaccctggaggctgtggttggggtgccacagcctcccagcgaggggcccatcacacaccagtggagcgtgcagatggagcctcccgtgccctgccactatgaggatctggagaggctcccggatgcagctgagccttgtctccccggagccctgttccgctgccctgttgtcttcaggcaggagatcctcgtccaagtgatcgggactctggagctggtgggagagatcgaggcctcttccatgttcagcctctgcagctccctctccatctccttcaacagcagcaagcatttccacctctatggcagcaacgcctccctggcccaggttgtcatgaaggttgacgtggtgtatgagaagcagatgctctacctctacgtgctgagcggcatcggggggctgctgctgctgctgctcattttcatagtgctgtacaaggttggtttcttcaaacggaacctgaaggagaagatggaggctggcagaggtgtcccgaatggaatccctgcagaagactctgagcagctggcatctgggcaagaggctggggatcccggctgcctgaagcccctccatgagaaggactctgagagtggtggtggcaaggactgagtccaggcctgtgaggtgcagagtgcccagaactggactcaggatgcccagggccactctgcctctgcctgcattctgccgtgtgccctcgggcgagtcactgcctctccctggccctcagtttccctatctcgaacatggaactcattcctgaatgtctcctttgcaggctcatagggaagacctgctgagggaccagccaagagggctgcaaaagtgagggcttgtcattaccagacggttcaccagcctctcttggttccttccttggaagagaatgtctgatctaaatgtggagaaactgtagtctcaggacctagggatgttctggccctcacccctgccctgggatgtccacagatgcctccaccccccagaacctgtccttgcacactcccctgcactggagtccagtctcttctgctggcagaaagcaaatgtgacctgtgtcactacgtgactgtggcacacgccttgttcttggccaaagaccaaattccttggcatgccttccagcaccctgcaaaatgagaccctcgtggccttccccagcctcttctagagccgtgatgcctccctgttgaagctctggtgacaccagcctttctcccaggccaggctccttcctgtcttcctgcattcacccagacagctccctctgcctgaaccttccatctcgcccacccctccttccttgaccagcagatcccagctcacgtcacacacttggttgggtcctcacatctttcacacttccaccaccctgcactactccctcaaagcacacgtcatgtttcttcatccggcagcctggatgttttttccctgtttaatgattgacgtacttagcagctatctctcagtgaactgtgagggtaaaggctatacttgtcttgttcaccttgggatgacgccgcatgatatgtcagggcgtgggacatctagtaggtgcttgacataatttcactgaattaatgacagagccagtgggaagatacagaaaaagagggccggggctgggcgcggtggttcacgcctgtaatcccagcactttgggaggccaaggagggtggatcacctgaggtcaggagttagaggccagcctggcgaaaccccatctctactaaaaatacaaaatccaggcgtggtggcacacacctgtagtcccagctactcaggaggttgaggtaggagaattgcttgaacctgggaggtggaggttgcagtgagccaagattgcgccattgcactccagcctgggcaacacagcgagactccgtctcaaggaaaaaataaaaataaaaagcgggcacgggcccggacatccccacccttggaggctgtcttctcaggctctgccctgccctagctccacaccctctcccaggacccatcacgcctgtgcagtggcccccacagaaagactgagctcaaggtgggaaccacgtctgctaacttggagccccagtgccaagcacagtgcctgcatgtatttatccaataaatgtgaaattctgtccaaaaaaaaaaaa

SEQ ID NO: 1291 - DNA, 540 bp; single-stranded, linear
  immediate source library: GENBANK
  immediate source clone: g31425
tgcgttttgggggttcctggagtatcaatcatggatcaagaaactgtaggcaatgttgtcctgttggccatcgtcaccctcatcagcgtggtccagaatggattctttgcccataaagtggagcacgaaagcaggacccagaatgggaggagcttccagaggaccggaacacttgcctttgagcgggtctacactgccaaccagaactgtgtagatgcgtaccccactttcctcgctgtgctctggtctgcggggctactttgcagccaagttcctgctgcgtttgctggactgatgtacttgtttgtgcggcaaaagtactttgtcggttacctaggagagagaacgcagagcacccctggctacatatttgggaaacgcatcatactcttcctgttcctcatgtccgttgctggcatattcaactattacctcatcttctttttcggaagtgactttgaaaactacataaagacgatctccaccaccatctcccctctacttctcatttcctaactctctgctgaatatggggttggt

SEQ ID NO: 1292 - DNA, 4204 bp; single-stranded, linear
  immediate source library: GENBANK
  immediate source clone: g31437
caggacagggaagagcgggcgctatggggagccggacgccagagtcccctctccacgccgtgcagctgcgctggggcccccggcgccgacccccgctcgtgccgctgctgttgctgctcgtgccgccgccacccagggtcgggggcttcaacttagacgcggaggccccagcagtactctcggggcccccgggctccttcttcggattctcagtggagttttaccggccgggaacagacggggtcagtgtgctggtgggagcacccaaggctaataccagccagccaggagtgctgcagggtggtgctgtctacctctgtccttggggtgccagccccacacagtgcacccccattgaatttgacagcaaaggctctcggctcctggagtcctcactgtccagctcagagggagaggagcctgtggagtacaagtccttgcagtggttcggggcaacagttcgagcccatggctcctccatcttggcatgcgctccactgtacagctggcgcacagagaaggagccactgagcgaccccgtgggcacctgctacctctccacagataacttcacccgaattctggagtatgcaccctgccgctcagatttcagctgggcagcaggacagggttactgccaaggaggcttcagtgccgagttcaccaagactggccgtgtggttttaggtggaccaggaagctatttctggcaaggccagatcctgtctgccactcaggagcagattgcagaatcttattaccccgagtacctgatcaacctggttcaggggcagctgcagactcgccaggccagttccatctatgatgacagctacctaggatactctgtggctgttggtgaattcagtggtgatgacacagaagactttgttgctggtgtgcccaaagggaacctcacttacggctatgtcaccatccttaatggctcagacattcgatccctctacaacttctcaggggaacagatggcctcctactttggctatgcagtggccgccacagacgtcaatggggacgggctggatgacttgctggtgggggcacccctgctcatggatcggacccctgacgggcggcctcaggaggtgggcagggtctacgtctacctgcagcacccagccggcatagagcccacgcccacccttaccctcactggccatgatgagtttggccgatttggcagctccttgacccccctgggggacctggaccaggatggctacaatgatgtggccatcggggctccctttggtggggagacccagcagggagtagtgtttgtatttcctgggggcccaggagggctgggctctaagccttcccaggttctgcagcccctgtgggcagccagccacaccccagacttctttggctctgcccttcgaggaggccgagacctggatggcaatggatatcctgatctgattgtggggtcctttggtgtggacaaggctgtggtatacaggggccgccccatcgtgtccgctagtgcctccctcaccatcttccccgccatgttcaacccagaggagcggagctgcagcttagaggggaaccctgtggcctgcatcaaccttagcttctgcctcaatgcttctggaaaacacgttgctgactccattggtttcacagtggaacttcagctggactggcagaagcagaagggaggggtacggcgggcactgttcctggcctccaggcaggcaaccctgacccagaccctgctcatccagaatggggctcgagaggattgcagagagatgaagatctacctcaggaacgagtcagaatttcgagacaaactctcgccgattcacatcgctctcaacttctccttggacccccaagccccagtggacagccacggcctcaggccagccctacattatcagagcaagagccggatagaggacaaggctcagatcttgctggactgtggagaagacaacatctgtgtgcctgacctgcagctggaagtgtttggggagcagaaccatgtgtacctgggtgacaagaatgccctgaacctcactttccatgcccagaatgtgggtgagggtggcgcctatgaggctgagcttcgggtcaccgcccctccagaggctgagtactcaggactcgtcagacacccagggaacttctccagcctgagctgtgactactttgccgtgaaccagagccgcctgctggtgtgtgacctgggcaaccccatgaaggcaggagccagtctgtggggtggccttcggtttacagtccctcatctccgggacactaagaaaaccatccagtttgacttccagatcctcagcaagaatctcaacaactcgcaaagcgacgtggtttcctttcggctctccgtggaggctcaggcccaggtcaccctgaacggtgtctccaagcctgaggcagtgctattcccagtaagcgactggcatccccgagaccagcctcagaaggaggaggacctgggacctgctgtccaccatgtctatgagctcatcaaccaaggccccagctccattagccagggtgtgctggaactcagctgtccccaggctctggaaggtcagcagctcctatatgtgaccagagttacgggactcaactgcaccaccaatcaccccattaacccaaagggcctggagttggatcccgagggttccctgcaccaccagcaaaaacgggaagctccaagccgcagctctgcttcctcgggacctcagatcctgaaatgcccggaggctgagtgtttcaggctgcgctgtgagctcgggcccctgcaccaacaagagagccaaagtctgcagttgcatttccgagtctgggccaagactttcttgcagcgggagcaccagccatttagcctgcagtgtgaggctgtgtacaaagccctgaagatgccctaccgaatcctgcctcggcagctgccccaaaaagagcgtcaggtggccacagctgtgcaatggaccaaggcagaaggcagctatggcgtcccactgtggatcatcatcctagccatcctgtttggcctcctgctcctaggtctactcatctacatcctctacaagcttggattcttcaaacgctccctcccatatggcaccgccatggaaaaagctcagctcaagcctccagccacctctgatgcctgagtcctcccaatttcagactcccattcctgaagaaccagtccccccaccctcattctactgaaaaggaggggtctgggtacttcttgaaggtgctgacggccagggagaagctcctctccccagcccagagacatacttgaagggccagagccaggggggtgaggagctggggatccctcccccccatgcactgtgaaggacccttgtttacacataccctcttcatggatgggggaactcagatccagggacagaggcccagcctccctgaagcctttgcattttggagagtttcctgaaacaactggaaagataactaggaaatccattcacagttctttgggccagacatgccacaaggacttcctgtccagctccaacctgcaaagatctgtcctcagccttgccagagatccaaaagaagcccccagtaagaacctggaacttggggagttaagacctggcagctctggacagccccaccctggtgggccaacaaagaacactaactatgcatggtgccccaggaccagctcaggacagatgccacaaggatagatgctggcccagggccagagcccagctccaaggggaatcagaactcaaatggggccagatccagcctggggtctggagttgatctggaacccagactcagacattggcaccaatccaggcagatccaggactatatttgggcctgctccagacctgatcctggaggcccagttcaccctgatttaggagaagccaggaatttcccaggacctgaaggggccatgatggcaacagatctggaacctcagcctggccagacacaggccctccctgttccccagagaaaggggagcccactgtcctgggcctgcagaatttgggttctgcctgccagctgcactgatgctgcccctcatctctctgcccaacccttccctcaccttggcaccagacacccaggacttatttaaactctgttgcaagtgcaataaatctgacccagtgcccccactgaccagaactagaaaaaaaaa

SEQ ID NO: 1293 - DNA, 3614 bp; single-stranded, linear
  immediate source library: GENBANK
  immediate source clone: g31441
gtccgccaaaacctgcgcggatagggaagaacagcaccccggcgccgattgccgtaccaaacaagcctaacgtccgctgggccccggacgccgcgcggaaaagatgaatttacaaccaattttctggattggactgatcagttcagtttgctgtgtgtttgctcaaacagatgaaaatagatgtttaaaagcaaatgccaaatcatgtggagaatgtatacaagcagggccaaattgtgggtggtgcacaaattcaacatttttacaggaaggaatgcctacttctgcacgatgtgatgatttagaagccttaaaaaagaagggttgccctccagatgacatagaaaatcccagaggctccaaagatataaagaaaaataaaaatgtaaccaaccgtagcaaaggaacagcagagaagctcaagccagaggatattcatcagatccaaccacagcagttggttttgcgattaagatcaggggagccacagacatttacattaaaattcaagagagctgaagactatcccattgacctctactaccttatggacctgtcttattcaatgaaagacgatttggagaatgtaaaaagtcttggaacagatctgatgaatgaaatgaggaggattacttcggacttcagaattggatttggctcatttgtggaaaagactgtgatgccttacattagcacaacaccagctaagctcaggaacccttgcacaagtgaacagaactgcaccaccccatttagctacaaaaatgtgctcagtcttactaataaaggagaagtatttaatgaacttgttggaaaacagcgcatatctggaaatttggattctccagaaggtggtttcgatgccatcatgcaagttgcagtttgtggatcactgattggctggaggaatgttacacggctgctggtgttttccacagatgccgggtttcactttgctggagatgggaaacttggtggcattgttttaccaaatgatggacaatgtcacctggaaaataatatgtacacaatgagccattattatgattatccttctattgctcaccttgtccagaaactgagtgaaaataatattcagacaatttttgcagttactgaagaatttcagcctgtttacaaggagctgaaaaacttgatccctaagtcagcagtaggaacattatctgcaaattctagcaatgtaattcagttgatcattgatgcatacaattccctttcctcagaagtcattttggaaaacggcaaattgtcagaaggagtaacaataagttacaaatcttactgcaagaacggggtgaatggaacaggggaaaatggaagaaaatgttccaatatttccattggagatgaggttcaatttgaaattagcataacttcaaataagtgtccaaaaaaggattctgacagctttaaaattaggcctctgggctttacggaggaagtagaggttattcttcagtacatctgtgaatgtgaatgccaaagcgaaggcatccctgaaagtcccaagtgtcatgaaggaaatgggacatttgagtgtggcgcgtgcaggtgcaatgaagggcgtgttggtagacattgtgaatgcagcacagatgaagttaacagtgaagacatggatgcttactgcaggaaagaaaacagttcagaaatctgcagtaacaatggagagtgcgtctgcggacagtgtgtttgtaggaagagggataatacaaatgaaatttattctggcaaattctgcgagtgtgataatttcaactgtgatagatccaatggcttaatttgtggaggaaatggtgtttgcaagtgtcgtgtgtgtgagtgcaaccccaactacactggcagtgcatgtgactgttctttggatactagtacttgtgaagccagcaacggacagatctgcaatggccggggcatctgcgagtgtggtgtctgtaagtgtacagatccgaagtttcaagggcaaacgtgtgagatgtgtcagacctgccttggtgtctgtgctgagcataaagaatgtgttcagtgcagagccttcaataaaggagaaaagaaagacacatgcacacaggaatgttcctattttaacattaccaaggtagaaagtcgggacaaattaccccagccggtccaacctgatcctgtgtcccattgtaaggagaaggatgttgacgactgttggttctattttacgtattcagtgaatgggaacaacgaggtcatggttcatgttgtggagaatccagagtgtcccactggtccagacatcattccaattgtagctggtgtggttgctggaattgttcttattggccttgcattactgctgatatggaagcttttaatgataattcatgacagaagggagtttgctaaatttgaaaaggagaaaatgaatgccaaatgggacacgggtgaaaatcctatttataagagtgccgtaacaactgtggtcaatccgaagtatgagggaaaatgagtactgcccgtgcaaatcccacaacactgaatgcaaagtagcaatttccatagtcacagttaggtagctttagggcaatattgccatggttttactcatgtgcaggttttgaaaatgtacaatatgtataatttttaaaatgttttattattttgaaaataatgttgtaattcatgccagggactgacaaaagacttgagacaggatggttattcttgtcagctaaggtcacattgtgcctttttgaccttttcttcctggactattgaaatcaagcttattggattaagtgatatttctatagcgattgaaagggcaatagttaaagtaatgagcatgatgagagtttctgttaatcatgtattaaaactgatttttagctttacatatgtcagtttgcagttatgcagaatccaaagtaaatgtcctgctagctagttaaggattgttttaaatctgttattttgctatttgcctgttagacatgactgatgacatatctgaaagacaagtatgttgagagttgctggtgtaaaatacgtttgaaatagttgatctacaaaggccatgggaaaaattcagagagttaggaaggaaaaaccaatagctttaaaacctgtgtgccattttaagagttacttaatgtttggtaacttttatgccttcactttacaaattcaagccttagataaaagaaccgagcaattttctgctaaaaagtccttgatttagcactatttacatacaggccatactttacaaagtatttgctgaatggggaccttttgagttgaatttattttattatttttattttgtttaatgtctggtgctttctatcacctcttctaatcttttaatgtatttgtttgcaattttggggtaagacttttttatgagtactttttctttgaagttttagcggtcaatttgcctttttaatgaacatgtgaagttatactgtggctatgcaacagctctcacctacgcgagtcttactttgagttagtgccataacagaccactgtatgtttacttctcaccatttgagttgcccatcttgtttcacactagtcacattcttgttttaagtgcctttagttttaacagttca

SEQ ID NO: 1294 - DNA, 3088 bp; single-stranded, linear
  immediate source library: GENBANK
  immediate source clone: g31667
atgggcggcgagtggggagcggggccgggagtggagcagccgccgcggcggactggaccgagcctcgccggcgcgcacctgcccgcagcgcccgcggacgcgcagcgcggcccgagcgcgacgacctgccgagcggcggccgaggcggcggtgtgggcgcgtcaggccgcgacgagggcgctgagacaaatttacatgtattggagaccagaccagaagcccttctgaattaagatctcacattcttgaaggtggcattgaagagcactaagatcggaagatgagtgagcttgaccagttacggcaggaggccgagcaacttaagaaccagattcgagacgccaggaaagcatgtgcagatgcaactctctctcagatcacaaacaacatcgacccagtgggaagaatccaaatgcgcacgaggaggacactgcgggggcacctggccaagatctacgccatgcactggggcacagactccaggcttctcgtcagtgcctcgcaggatggtaaacttatcatctgggacagctacaccaccaacaaggtccacgccatccctctgcgctcctcctgggtcatgacctgtgcatatgccccttctgggaactatgtggcctgcggtggcctggataacatttgctccatttacaatctgaaaactcgtgaggggaacgtgcgcgtgagtcgtgagctggcaggacacacaggttacctgtcctgctgccgattcctggatgacaatcagatcgtcaccagctctggagacaccacgtgtgccctgtgggacatcgagaccggccagcagacgaccacgtttaccggacacactggagatgtcatgagcctttctcttgctcctgacaccagactgttcgtctctggtgcttgtgatgcttcagccaaactctgggatgtgcgagaaggcatgtgccggcagaccttcactggccacgagtctgacatcaatgccatatgcttctttccaaatggcaatgcatttgccactggctcagacgacgccacctgcaggctgtttgaccttcgtgctgaccaggagctcatgacttactcccatgacaacatcatctgcgggatcacctctgtctccttctccaagagcgggcgcctcctccttgctgggtacgacgacttcaactgcaacgtctgggatgcactcaaagccgaccgggcaggtgtcttggctgggcatgacaaccgcgtcagctgcctgggcgtgactgacgatggcatggctgtggcgacagggtcctgggatagcttcctcaagatctggaactaacgccagtagcatgtggatgccatggagactggaagaccattccaacttggacgcgttaccatgagagccaaccgtactaacgtgacaaccctacacctcccctcagaacttcaaaagggcaagatcttttttccttcacttattgctcatatcctatgaaaccaagagcacaattcccattgagagaaagatctctgtgctgtaaactaaaacaaattgtgcattccttccggggccatcgtctttgttttcttttttgtcttgaatgaattttaaaaggaaatatataataaaaatgttaaccagaaggtaaacttgagtgtaattgtcagacagacacacttttccaccagtgtatttgaattttagaccagtgaccctgttttgtggcattcatgcaaaacatgctgagggctttgttcatctggtcatcgtgtccaaatttcagtcatgtttgtagcaagattttggaagcattcatatttcctttttaaaatgtattcctttgtgttcaacagttaatcaaaaccagagagtctagggcagcctctctgatgttgtcaatgatgtaaattcagtccctggtttttaattttctgtctgatgtcacagatcattgttgcacacaaacgtggcatagaaaagaacatgttcagaagccatggggccaagcacaatgcggggacggtctcaaaatgcgtgatcagagaatccttcaccttatgctgaaaagtgagctcagatccacctccaatgttcctcctgacccatcctgtctatcttctcagttgagtttttaatctcactttgggtttccttgtgaagttggagggaagtttataatagcctaacactaccccacccccaactaggaggaacctctgttttcaagagagatgcctgtcctgtgcttggatagtcagtcaattatttgtgtatgaaacaatgtacaaatcaatgttttgaaaataatgatctcagactttctaagttaaagttttaaaaattttgattgtttgccatattgggtgggtttactcttagaatcgcatgctgtagaaaatgctcaaaagtgcatatgggactcagtccttaggtgttctttttcttttaagaaataacctcttacagttgtaaccattgcggctctgtccacttctcgttgctgctctgtggcacatatcggaagcagtacagcgcgcggctctacacgcttgggtagcgggataagtcactgttttctttatttctttaaaaaaaaaaaaagttctgttgcaaacgactgctgttggattctgagggtggggagggagagagagggagggagagggagtgaagagcctgccctcctatagtggattcttcacgggccctccacatctgaggtggctcattcccatcacacacagattgtcctggtgttcatttcaaggccagttgtcagcagcagcgtttggaaagcaggttctgtgggaccccccgccccgccccccgcactccttcatagcagcagtagtggcttctccatcctgttttctgcaacattctatacaaaactgtgctgtgaccttgcggtaggcctggatctggcaaagagaatacaaatgaaaccccttctttctctttccgtccaacaactctgtagagctctctgcacccttacccctttccaccttttgtatttaattttaaagtcagtgtactgcaaggaagctggatgcaagatagatactatattaaactgtactgttatttaagatgtaataaagcagtttgacatgaggg

SEQ ID NO: 1295 - DNA, 971 bp; single-stranded, linear
  immediate source library: GENBANK
  immediate source clone: g31880
cggcctctctgcggggctcactctgcgcttcaccatggctttcattgccaagtccttctatgacctcagtgccatcagcctggatggggagaaggtagatttcaatacgttccggggcagggccgtgctgattgagaatgtggcttcgctctgaggcacaaccacccgggacttcacccagctcaacgagctgcaatgccgctttcccaggcgcctggtggtccttggcttcccttgcaaccaatttggacatcaggagaactgtcagaatgaggagatcctgaacagtctcaagtatgtccgtcctgggggtggataccagcccaccttcacccttgtccaaaaatgtgaggtgaatgggcagaacgagcatcctgtcttcgcctacctgaaggacaagctcccctacccttatgatgacccattttccctcatgaccgatcccaagctcatcatttggagccctgtgcgccgctcagatgtggcctggaactttgagaagttcctcatagggccggagggagagcccttccgacgctacagccgcaccttcccaaccatcaacattgagcctgacatcaagcgcctccttaaagttgccatatagatgtgaactgctcaacacacagatctcctactccatccagtcctgaggagccttaggatgcagcatgccttcaggagacactgctggacctcagcattcccttgatatcagtccccttcactgcagagccttgcctttcccctctgcctgtttccttttcctctcccaaccctctggttggtgattcaacttgggctccaagacttgggtaagctctgggccttcacagaatgatggcaccttcctaaaccctcatgggtggtgtctgagaggcgtgaagggcctggagccactctgctagaagagaccaataaagggcaggtgtggaaacggcaaaaaaaaaaaaaaaaaaaaaaaaaaaaaa

SEQ ID NO: 1296 - DNA, 1968 bp; single-stranded, linear
  immediate source library: GENBANK
  immediate source clone: g32054
aattccgccgggcgcttagaacagaggcttgcacaggtggagatgtggaagtctgtagtgggccatgatgtgtctgtttccgtggagacccagggtgatgattgggacacagatcctgactttgtgaatgacatctctgaaaaggagcaacgatggggagccaagaccatcgaggggtctggacgcacagaacacatcaacatccaccagctgaggaacaaagtatcagaggagcatgatgttctcaggaagaaagagatggagtcagggcccaaagcatcccatggctatggaggtcggtttggagtagaaagagaccgaatggacaagagtgcagtgggccatgagtatgttgccgaggtggagaagcactcttctcagacggatgctgccaaaggctttgggggcaagtacggagttgagagggacagggcagacaagtcagcagtcggctttgattataaaggagaagtggagaagcatacatctcagaaagattactctcgtggctttggtggccggtacggggtggagaaggataaatgggacaaagcagctctgggatatgactacaagggagagacggagaaacacgagtcccagagagattatgccaagggctttggtggccagtatggaatccagaaggaccgagtggataagagcgctgtcggcttcaatgaaatggaggccccgaccacagcttataagaagacgacgcccatagaagccgcttctagtggtgcccgtgggctgaaggcgaaatttgagtccatggctgaggagaagaggaagcgagaggaagaggagaaggcacagcaggtggccaggaggcaacaggagcgaaaggctgtgacaaagaggagccctgaggctccacagccagtgatagctatggaagagccagcagtaccggccccactgcccaagaaaatctcctcagaggcctggcctccagttgggactcctccatcatcagagtctgagcctgtgagaaccagcagggaacacccagtgcccttgctgcccattaggcagactctcccggaggacaatgaggagcccccagctctgccccctaggactctggaaggcctccaggtggaggaagagccagtgtacgaagcagagcctgagcctgagcccgagcctgagcccgagcctgagaatgactatgaggacgttgaggagatggacaggcatgagcaggaggatgaaccagagggggactatgaggaggtgctcgagcctgaagattcttctttttcttctgctctggctggatcatcaggctgcccggctggggctggggctggggctgtggctctggggatctcagctgtggctctatatgattaccaaggagagggaagtgatgagctttcctttgatccggacgacgtaatcactgacattgagatggtggacgagggctggtggcggggacgttgccatggccactttggactcttccctgcaaattatgtcaagcttctggagtgactagagctcactgtctactgcaactgtgatttcccatgtccaaagtggctctgctccaccccctccctattcctgatgcaaatgtctaaccagatgagtttctggacagacttccctctcctgcttcattaagggcttggggcagagacagcatggggaaggaggtccccttccccaagagtcctctctatcctggatgagctcatgaacatttctcttgtgttcctgactccttcccaatgaacacctctctgccaccccaagctctgctctcctcctctgtgagctctgggcttcccagtttgtttacccgggaaagtacgtctagattgtgtggtttgcctcattgtgctatttgcccactttccttccctgaagaaatatctgtgaaccttctttctgttcagtcctaaaattcgaaataaagtgagactatggttcacctgtaaaaaaaaaaaaggaatt

SEQ ID NO: 1297 - DNA, 1182 bp; single-stranded, linear
  immediate source library: GENBANK
  immediate source clone: g32432
gaattccgctagactaagttggtcatgatgcagaagctactcaaatgcagtcggcttgtcctggctcttgccctcatcctggttctggaatcctcagttcaaggttatcctacgcagagagccaggtaccaatgggtgcgctgcaatccagacagtaattctgcaaactgccttgaagaaaaaggaccaatgttcgaactacttccaggtgaatccaacaagatcccccgtctgaggactgacctttttccaaagacgagaatccaggacttgaatcgtatcttcccactttctgaggactactctggatcaggcttcggctccggctccggctctggatcaggatctgggagtggcttcctaacggaaatggaacaggattaccaactagtagacgaaagtgatgctttccatgacaaccttaggtctcttgacaggaatctgccctcagacagccaggacttgggtcaacatggattagaagaggattttatgttataaaagaggattttcccaccttgacaccaggcaatgtagttagcatattttatgtaccatggttatatgattaatcttgggacaaagaattttatagaaatttttaaacatctgaaaaagaagcttaagttttatcatccttttttttctcatgaattcttaaaggattatgctttaatgctgttatctatcttattgttcttgaaaatacctgcattttttggtatcatgttcaaccaacatcattatgaaattaattagattcccatggccataaaatggctttaaagaatatatatatatttttaaagtagcttgagaagcaaattggcaggtaatatttcatacctaaattaagactctgacttggattgtgaattataatgatatgccccttttcttataaaaacaaaaaaaaaataatgaaacacagtgaatttgtagagtgggggtatttgacatattttacagggtggagtgtactatatactattacctttgaatgtgtttgcagagctagtggatgtgtttgtctacaagtatgattgctgttacataacaccccaaattaactcccaaattaaaacacagttgtgctgtcaatacctcatactgctttacctttttttcctggatatctgtgtattttcaaatgttactatatattaaagcagaaatataacc

SEQ ID NO: 1298 - DNA, 1331 bp; single-stranded, linear
  immediate source library: GENBANK
  immediate source clone: g32449
tcttgctgcgcctccgcctcctcctctgctccgccaccggcttcctcctcctgagcagtcagcccgcgcgccggccggctccgttatggcgacccgcagccctggcgtcgtgattagtgatgatgaaccaggttatgaccttgatttattttgcatacctaatcattatgctgaggatttggaaagggtgtttattcctcatggactaattatggacaggactgaacgtcttgctcgagatgtgatgaaggagatgggaggccatcacattgtagccctctgtgtgctcaaggggggctataaattctttgctgacctgctggattacatcaaagcactgaatagaaatagtgatagatccattcctatgactgtagattttatcagactgaagagctattgtaatgaccagtcaacaggggacataaaagtaattggtggagatgatctctcaactttaactggaaagaatgtcttgattgtggaagatataattgacactggcaaaacaatgcagactttgctttccttggtcaggcagtataatccaaagatggtcaaggtcgcaagcttgctggtgaaaaggaccccacgaagtgttggatataagccagactttgttggatttgaaattccagacaagtttgttgtaggatatgcccttgactataatgaatacttcagggatttgaatcatgtttgtgtcattagtgaaactggaaaagcaaaatacaaagcctaagatgagagttcaagttgagtttggaaacatctggagtcctattgacatcgccagtaaaattatcaatgttctagttctgtggccatctgcttagtagagctttttgcatgtatcttctaagaattttatctgttttgtactttagaaatgtcagttgctgcattcctaaactgtttatttgcactatgagcctatagactatcagttccctttgggcggattgttgtttaacttgtaaatgaaaaaattctcttaaaccacagcactattgagtgaaacattgaactcatatctgtaagaaataaagagaagatatattagttttttaattggtattttaatttttatatatgcaggaaagaatagaagtgattgaatattgttaattataccaccgtgtgttagaaaagtaagaagcagtcaattttcacatcaaagacagcatctaagaagttttgttctgtcctggaattattttagtagtgtttcagtaatgttgactgtattttccaacttgttcaaattattaccagtgaatctttgtcagcagttcccttttaaatgcaaatcaataaattcccaaaaattt

SEQ ID NO: 1299 - DNA, 4998 bp; single-stranded, linear
  immediate source library: GENBANK
  immediate source clone: g32455
atgaggacacttgggacttgcctggcgactttggccggacttttgctaactgcggcgggcgagacgttctcaggtggctgcctctttgatgagccgtatagcacatgtggatatagtcaatctgaaggtgatgacttcaattgggagcaagtgaacaccttgactaaaccgacttctgatccatggatgccatcaggttctctcatgctggtgaatgcctctgggagacctgaggggcagagagcccacctgctcttaccccaacttaaggaaaatgacacccactgcatcgattttcactattttgtgtccagcaagagtaattctcctccggggttactcaatgtctacgtgaaggtcaataacgggccactggggaatcctatctggaatatatctggagacccaacacgtacatggaacagggcagaactggccattagtactttctggcctaacttttatcaggtgatttttgaagtgataacttctggacatcaaggctatctcgctatcgatgaggtgaaggtgttaggacatccatgtaccaggactcctcacttcctgcggattcagaatgtggaagttaatgctggccagtttgctaccttccagtgcagtgccatcggcaggaccgtggcaggagacaggctctggttacagggcattgatgtgcgagatgctcctctgaaggaaatcaaggtgaccagctcccgacgcttcattgcttcatttaatgttgtgaataccaccaaacgagatgctggaaagtaccgctgcatgattcgcactgaaggaggtgttggaatatcaaactatgcagagttggtagttaaagaaccacccgttcctattgccccacctcagctcgcctctgtaggagccacctacctgtggatacagctcaacgccaactccatcaatggggatgggcccattgtggcccgagaggtggagtactgcacggccagtgggagctggaatgaccggcagccagtcgattccacgagctataaaattggacaccttgacccagatacagaatatgagattagtgtgctcctgaccaggccaggggagggtggcactggctctcctggtccagctctcaggacaagaacaaagtgtgctgatcccatgcgaggcccaagaaaactagaagtagtggaggtcaaatctcggcaaatcactatccgctgggagccatttggatataatgtaactcgttgccacagttataatctcactgtccactactgttaccaagttggaggacaagaacaagtgcgagaagaagtaagctgggatacagaaaattcacaccctcaacacacgatcactaacctgtcaccatacaccaatgtcagtgtgaaactgatcctcatgaacccagagggccggaaggaaagccaagaactcatagtgcagacagatgaagacctcccaggtgctgttcccactgaatccatacaaggaagtacctttgaagagaagatatttcttcagtggagagaaccaactcaaacatatggtgtaatcactttatatgagatcacctacaaagcagtcagttcctttgacccagaaatagatttatccaatcagagtggaagagtttcaaagctgggaaatgaaacccattttctgttttttggactgtatccggggaccacatactcctttaccatccgagctagcacagctaagggttttgggcctccagcaacaaaccagttcaccaccaaaatatcagcaccctctatgccagcttatgaacttgagacacctttgaatcaaactgacaataccgtgacagtcatgctgaaacctgcccacagcagaggagcacctgtcagtgtctatcaaatagttgttgaggaagaacgtcctcgaagaactaaaaagacgacagaaatcttaaagtgctacccagtgccaattcacttccagaatgcttctctgctgaactcacagtactactttgctgcagaatttcctgcagacagcctccaagctgcgcagccttttacaattggtgataataagacatataatggatactggaacactccccttctcccctataaaagctacagaatttatttccaagctgctagtagagccaatggggaaaccaaaatagactgtgtccaagtggccacaaaaggagctgccactccgaaaccagtcccagaacccgagaaacagacagaccatacagttaaaattgctggagtcatcgcgggcatcttgctgttcgtgattatatttcttggagttgtgttggtaatgaagaaaaggaaactggccaagaagcggaaagagaccatgagcagcacccgacaggagatgactgtgatggtgaactcaatggacaagagctatgctgagcagggcacaaactgcgacgaggctttctcattcatggacacgcacaatctgaatgggagatctgtgtcttcaccatcgtccttcacaatgaaaacaaatacactgagcacatcggtgcctaattcctattacccagatgaaacccacacaatggccagcgataccagcagcctggtgcagtcccatacttacaagaagcgagagccggccgacgtgccctatcagactgggcagctccaccccgccatccgggtggcagacctccttcagcacatcacacagatgaagtgtgcggagggctacggcttcaaggaggaatacgagagcttctttgaagggcagtctgcaccatgggactcggctaagaaagatgagaacagaatgaagaacagatacgggaatatcattgcatacgatcattcccgagtgaggctgcagacaatagaaggagacacaaactcagactatatcaatggcaattatatcgatggttatcatcgacccaatcattacattgctacccaagggccaatgcaggaaaccatctatgacttctggaggatggtgtggcacgaaaacactgcaagtatcatcatggtgaccaatcttgtggaagtgggaagggtcaaatgctgcaaatactggccagatgacacagagatatataaagacattaaagttaccctaatagaaacagaactactggcagaatatgtgataagaacatttgctgttgaaaagagaggtgtgcatgaaatccgagagatcagacagtttcacttcactggctggccggatcatggggtcccctaccatgccaccggcctgctgggattcgtgcggcaagtcaagtccaagagcccgcccagtgcaggcccactggtggtgcactgcagtgctggtgcagggaggactggctgtttcatcgtcattgatatcatgttggacatggccgaaagggaaggggtcgtagacatctacaactgcgtcagggagctgcggtcacggagggtgaacatggtgcaaacagaggagcagtatgtgtttatccacgatgcgatcctggaagcctgtctttgtggggacacctctgtgcctgcttcccaagttaggtctctgtattatgacatgaacaaactggatccacagacaaactcaagccagattaaagaggaattccggacgctaaacatggtgacaccaacgctgcgagtagaggactgcagcatcgcactgttgccccggaaccatgagaaaaaccggtgcatggacatcctgcccccagaccgctgcctgcccttcctcatcaccatcgatggggagagcagcaactacatcaatgctgccctcatggacagctataaacagccttcagcttttatagtcacccagcatcctttgccaaacacagtgaaagacttttggagactggtcctggattatcactgcacatccgtagttatgctaaatgatgtggatcctgcccagttgtgtccacagtactggccagaaaacggagtacacagacacggccccatccaggtggaatttgtctctgctgacctggaagaggacatcatcagcaggatattccgcatttacaatgccgccagaccccaagatggatatcggatggtgcagcaattccagttcctgggctggccgatgtacagggacacaccagtgtctaagcgctccttcttgaagctcattcgccaggtggacaagtggcaagaggaatacaatggcggggaaggcccgaccgttgtgcactgcttgaacgggggaggccgcagtgggacgttctgcgccatcagcatcgtatgtgagatgctccggcaccagagaaccgtggatgtctttcacgctgtgaagacactgaggaacaacaagcccaacatggtcgacctcctggatcagtacaagttctgctacgaggtggccctggaatacttgaattctggctgatggtgtaaacagctctgcaaacaatccctttcataccacaaagccaagacgttccatggtatttgtgcaaaagagatgaagacttctcaatatgcttattttgctttgactaattggctctttttaagagccaagaaagtgtttctaaaattgcttgcactgcccaatcccagtaatgctgctgcctgacagaaacacacacacagccacagttgccaaatncccgtactccttgccacggttctagagcagcgtagacagctggtaaactgaagagcacaactatattcttatgaaggaatttgtacctttggggtattattttgtggcccgtgaccctcgttattgttacagctgagtgtatgtttttgttctgtggagaatgctatctggcattatggtaatatattattttaggtaatatttgtactttaacatgttgcataatatatgcttatgtagctttccaggactaacagataaatgtgtaataacaaagatatgttgtatgagtngtcgtttctgtcagatttgtattgtttccaagggaaaannttgggggaggactcagttcacaaaatgcaaaactcaacgatcagattcacggacccagagcttttccatgtgtttatattgtaa

SEQ ID NO: 1300 - DNA, 789 bp; single-stranded, linear
  immediate source library: GENBANK
  immediate source clone: g32477
gcccagcgccccgcacttttctgagcagacgtccagagcagagtcagccagcatgaccgagcgccgcgtccccttctcgctcctgcggggccccagctgggaccccttccgcgactggtacccgcatagccgcctcttcgaccaggccttcgggctgccccggctgccggaggagtggtcgcagtggttaggcggcagcagctggccaggctacgtgcgccccctgccccccgccgccatcgagagccccgcagtggccgcgcccgcctacagccgcgcgctcagccggcaactcagcagcggggtctcggagatccggcacactgcggaccgctggcgcgtgtccctggatgtcaaccacttcgccccggacgagctgacggtcaagaccaaggatggcgtggtggagatcaccggcaagcacgaggagcggcaggacgagcatggctacatctcccggtgcttcacgcggaaatacacgctgccccccggtgtggaccccacccaagtttcctcctccctgtcccctgagggcacactgaccgtggaggcccccatgcccaagctagccacgcagtccaacgagatcaccatcccagtcaccttcgagtcgcgggcccagcttgggggcccagaagctgcaaaatccgatgagactgccgccaagtaaagccttagcccggatgcccacccctgctgccgccactggctgtgcctcccccgccacctgtgtgttcttttgatacatttatcttctgtttttctcaaataaagttcaaagcaaccacc

SEQ ID NO: 1301 - DNA, 985 bp; single-stranded, linear
  immediate source library: GENBANK
  immediate source clone: g32485
ccggcccggtgtggctgtgccgttggtcctgtgcggtcacttagccaagatgcctgaggaaacccagacccaagaccaaccgatggaggaggaggaggttgagacgttcgcctttcaggcagaaattgcccagttgatgtcattgatcatcaatactttctactcgaacaaagagatctttctgagagagctcatttcaaattcatcagatgcattggacaaaatccggtatgaaagcttgacagatcccagtaaattagactctgggaaagagctgcatattaaccttataccgaacaaacaagatcgaactctcactattgtggatactggaattggaatgaccaaggctgacttgatcaataaccttggtactatcgccaagtctgggaccaaagcgttcatggaagctttgcaggctggtgcagatatctctatgattggccagttcggtgttggtttttattctgcttatttggttgctgagaaagtaactgtgatcaccaaacataacgatgatgagcagtacgcttgggagtcctcagcagggggatcattcacagtgaggacagacacaggtgaacctatgggtcgtggaacaaaagttatcctacacctgaaagaagaccaaactgagtacttggaggaacgaagaataaaggagattgtgaagaaacattctcagtttattggatatcccattactctttttgtggagaaggaacgtgataaagaagtaagcgatgatgaggctgaagaaaaggaagacaaagaagaagaaaaagaaaaagaagagaaagagtcggaagacaaacctgaaattgaagatgttggttctgatgaggaagaagaaaagaaggatggtgacaagaagaagaagaagaagattaaggaaaagtacatcgatcaagaagagctcaacaaaacaaagcccatctggaccagaaatcccgacgatattactaatgaggagtacggagaattc

SEQ ID NO: 1302 - DNA, 1193 bp; single-stranded, linear
  immediate source library: GENBANK
  immediate source clone: g32691
tgaagatcagctattagaagagaaagatcagttaagtcctttggacctgatcagcttgatacaagaactactgatttcaacttctttggcttaattctctcggaaacgatgaaatatacaagttatatcttggcttttcagctctgcatcgttttgggttctcttggctgttactgccaggacccatatgtaaaagaagcagaaaaccttaagaaatattttaatgcaggtcattcagatgtagcggataatggaactcttttcttaggcattttgaagaattggaaagaggagagtgacagaaaaataatgcagagccaaattgtctccttttacttcaaactttttaaaaactttaaagatgaccagagcatccaaaagagtgtggagaccatcaaggaagacatgaatgtcaagtttttcaatagcaacaaaaagaaacgagatgacttcgaaaagctgactaattattcggtaactgacttgaatgtccaacgcaaagcaatacatgaactcatccaagtgatggctgaactgtcgccagcagctaaaacagggaagcgaaaaaggagtcagatgctgtttcaaggtcgaagagcatcccagtaatggttgtcctgcctgcaatatttgaattttaaatctaaatctatttattaatatttaacattatttatatggggaatatatttttagactcatcaatcaaataagtatttataatagcaacttttgtgtaatgaaaatgaatatctattaatatatgtattatttataattcctatatcctgtgactgtctcacttaatcctttgttttctgactaattaggcaaggctatgtgattacaaggctttatctcaggggccaactaggcagccaacctaagcaagatcccatgggttgtgtgtttatttcacttgatgatacaatgaacacttataagtgaagtgatactatccagttactgccggtttgaaaatatgcctgcaatctgagccagtgctttaatggcatgtcagacagaacttgaatgtgtcaggtgaccctgatgaaaacatagcatctcaggagatttcatgcctggtgcttccaaatattgttgacaactgtgactgtacccaaatggaaagtaactcatttgttaaaattatcaatatctaatatatatgaataaagtgtaagttcacaact

SEQ ID NO: 1303 - DNA, 328 bp; single-stranded, linear
  immediate source library: GENBANK
  immediate source clone: g32764
ccgcgtgctgccccggaagtctatgcgtttgcgacgccggagtggccggggagccgggacaagcgcaccctcgcctgcctgatccagaacttcatgcctgaggacatctcggtgcagtggctgcacaacgaggtgcagctcccggacgcccggcacagcacgacgcagccccgcaagaccaagggctccggcttcttcgtcttcagccgcctggaggtgaccagggccgaatgggagcagaaagatgagttcatctgccgtgcagtccatgaggcagcgagcccctcacagaccgtccagcgagcggtgtctgtaaatcccggtaaat

SEQ ID NO: 1304 - DNA, 174 bp; single-stranded, linear
  immediate source library: GENBANK
  immediate source clone: g32983
cccaggctccactgcccggcacagaaataacaaccacggttactgatcatctgggagctgtccaggaacccgacagagccggagggccacacatccacaggcaccaaatggacgacccggcgcttcaggtatcccagcccaccggagccccaatcgaggggccgggaggcagct

SEQ ID NO: 1305 - DNA, 4156 bp; single-stranded, linear
  immediate source library: GENBANK
  immediate source clone: g32998
gacaacttccccagataccccgtgggcaagttcttccaatatgacacctggaagcagtccacccagcgcctgcgcaggggcctgcctgccctcctgcgtgcccgccggggtcacgtgctcgccaaggagctcgaggcgttcagggaggccaaacgtcaccgtcccctgattgctctacccacccaagaccccgcccacgggggcgcccccccagagatggccagcaatcggaagtgagcaaaactgccgcaagtctgcagcccggcgccaccatcctgcagcctcctcctgaccacggacgtttccatcaggttccatcccgaaaatctctcggttccacgtccccctggggcttctcctgacccagtccccgtgccccgcctccccgaaacaggctactctcctcggccccctccatcgggctgaggaagcacagcagcatcttcaaacatgtacaaaatcgattggctttaaacacccttcacataccctccccccaaattatccccaattatccccacacataaaaaatcaaaacattaaactaacccccttcccccccccccacaacaaccctcttaaaactaattggctttttagaaacaccccacaaaagctcagaaattggctttaaaaaaaacaaccaccaaaaaaaatcaattggctaaaaaaaaaaagtattaaaaacgaattggctgagaaacaattggcaaaataaaggaatttggcactccccacccccctctttctcttctcccttggactttgagtcaaattggcctggacttgagtccctgaaccagcaaagagaaaagaagggccccagaaatcacaggtgggcacgtcgctcgtaccgccatctcccttctcacgggaattttcagggtaaactggccatccgaaaatagcaacaacccagactggctcctcactcccttttccatcactaaaaatcacagagcagtcagagggacccagtaagaccaaaggaggggaggacagagcatgaaaaccaaaatccatgcaaatgaaatgtaattggcacgaccctcacccccaaatcttacatctcaattcccatcctaaaaagcactcatactttatgcatccccgcagctacacacacacaacacacagcacacgcatgaacacagcacacacacgagcacagcacacacacgagcatacagcacacacacaaacgcacagcacacacagcacacagatgagcacacagcacacacacaaacgcacagcacacacacgcacacacatgcacacacagcacacaaacgcacggcacacacacgcacacacagtgcacacacagcacacacgcaaacgcacacgcacacacaaacgcacagcacacacgcacacacagcacacacacgagcacacagcacacaaacgcacagcacacgcacacacatgcacacacagcacactagcacacagcacacacacaaagacacagcacacacatgcacacacagcacacacacgcgaacacagcacacacgaacacagcacacacagcacacacacaaacacagcacacacatgcacacagcacatgcacacacagcacacacatgaacacagcacacagcacacacatgcacacagcacacacgcatgcacagcacacatgaacacagcacacacaaacacacagcacacacatgcacacacagcacacacactcatgcgcagcacatacatgaacacagctcacagcacacaaacacgcagcacacacgttgcacacgcaagcacccacctgcacacacacatgcgcacacacacgcacacccccacaaaattagatgaaaacaataagcatatctaagcaactacgatatctgtatggatcaggccaaagtcccgctaagattctccaatgttttcatggtctgagcccccctcctgttcccatctccactgcccctcggccctgtctgtgccctgcctctcagaggagggggctcagatggtgcggcctgagtgtgcggccggcggcatttgggatacacccgtaggtgggcggggtgtgtcccaggcctaattccatctttccaccatgacagagatgcccttgtgaggctggcctccttggcgcctgtccccacggcccccgcagcgtgagccacgatgctccccataccccacccattcccgatacaccttacttactgtgtgttggcccagccagagtgaggaaggagtttggccacattggagatggccggtagctgagcagacatgcccccacgagtagcctgactccctggtgtgctcctggaaggaagatcttggggacccccccaccggagcacacctagggatcatctttgcccgtctcctggggaccccccaagaaatgtggagtcctcgggggccgtgcactgatgcggggagtgtgggaagtctggcggttggaggggtgggtggggggcagtgggggctgggcggggggagttctggggtaggaagtggtcccgggagattttggatggaaaagtcaggaggattgacagcagacttgcagaattacatagagaaattaggaacccccaaatttcatgtcaattgatctattccccctctttgtttcttggggcatttttccttttttttttttttttgttttttttttacccctccttagctttatgcgctcagaaaccaaattaaaccccccccccatgtaacaggggggcagtgacaaaagcaagaacgcacgaagccagcctggagaccaccacgtcctgccccccgccatttatcgccctgattggattttgtttttcatctgtccctgttgcttgggttgagttgagggtggagcctcctggggggcatggccatgagcccccttggagaagtcagaggggagtggagaaggcatgtccggcctggcttctggggacagtggctggtccccagaagtcctgagggcggaggggggggttgggcagggtctcctcaggtgtcaggagggtgctcggaggccacaggagggggctcctggctggcctgaggctggccggaggggaaggggctagcaggtgtgtaaacagagggttccatcagctggggcagggtggccgccttccgcacacttgaggaaccctcccctctccctcggtgacatcttgcccgcccctcagcaccctgccttgtctccaggaggtccgaagctctgtgggacctcttgggggcaaggtggggtgaggccggggagtagggaggtcaggcgggtctgagcccacagagcaggagagctgccaggtctgcccatcgaccaggttgcttgggccccggagcccacgggtctggtgatgccatagcagccaccaccgcggcgcctagggctgcggcagggactcggcctctgggaggtttacctcgcccccacttgtgcccccagctcagcccccctgcacgcagcccgactagcagtctagaggcctgaggcttctgggtcctggtgacggggctggcatgaccccgggggtcgtccatgccagtccgcctcagtcgcagagggtccctcggcaagcgccctgtgagtgggccattcggaacattggacagaagcccaaagagccaaattgtcacaattgtggaacccacattggcctgagatccaaaacgcttcgaggcaccccaaattacctgcccattcgtcaggacacccacccacccagtgttatattctgcctcgccggagtgggtgttcccgggctgcctgtctgacctccgtgcctagtcgtggctctccatcttgtctcctccccgtgtccccaatgtcttcagtggggggccccctcttgggtcccctcctctgccatcacctgaagacccccacgccaaacactgaatgtcacctgtgcctgccgcctcggtccaccttgcggcccgtgtttgactcaactcagctcctttaacgctaatatttccggcaaaatcccatgcttgggttttgtctttaaccttgtaacgcttgcaatcccaataaagcattaaaagtcatgatcttctgaggtgttccactctctgacttgggtactggactgccggagggagggaaggggctgagcacctggaagcaggcagagggggatagaagagggaaggggaaggaaggcct

SEQ ID NO: 1306 - DNA, 4989 bp; single-stranded, linear
  immediate source library: GENBANK
  immediate source clone: g33058
ttttttttttttttgagaaagggaatttcatcccaaataaaaggaatgaagtctggctccggaggagggtccccgacctcgctgtgggggctcctgtttctctccgccgcgctctcgctctggccgacgagtggagaaatctgcgggccaggcatcgacatccgcaacgactatcagcagctgaagcgcctggagaactgcacggtgatcgagggctacctccacatcctgctcatctccaaggccgaggactaccgcagctaccgcttccccaagctcacggtcattaccgagtacttgctgctgttccgagtggctggcctcgagagcctcggagacctcttccccaacctcacggtcatccgcggctggaaactcttctacaactacgccctggtcatcttcgagatgaccaatctcaaggatattgggctttacaacctgaggaacattactcggggggccatcaggattgagaaaaatgctgacctctgttacctctccactgtggactggtccctgatcctggatgcggtgtccaataactacattgtggggaataagcccccaaaggaatgtggggacctgtgtccagggaccatggaggagaagccgatgtgtgagaagaccaccatcaacaatgagtacaactaccgctgctggaccacaaaccgctgccagaaaatgtgcccaagcacgtgtgggaagcgggcgtgcaccgagaacaatgagtgctgccaccccgagtgcctgggcagctgcagcgcgcctgacaacgacacggcctgtgtagcttgccgccactactactatgccggtgtctgtgtgcctgcctgcccgcccaacacctacaggtttgagggctggcgctgtgtggaccgtgacttctgcgccaacatcctcagcgccgagagcagcgactccgaggggtttgtgatccacgacggcgagtgcatgcaggagtgcccctcgggcttcatccgcaacggcagccagagcatgtactgcatcccttgtgaaggtccttgcccgaaggtctgtgaggaagaaaagaaaacaaagaccattgattctgttacttctgctcagatgctccaaggatgcaccatcttcaagggcaatttgctcattaacatccgacgggggaataacattgcttcagagctggagaacttcatggggctcatcgaggtggtgacgggctacgtgaagatccgccattctcatgccttggtctccttgtccttcctaaaaaaccttcgcctcatcctaggagaggagcagctagaagggaattactccttctacgtcctcgacaaccagaacttgcagcaactgtgggactgggaccaccgcaacctgaccatcaaagcagggaaaatgtactttgctttcaatcccaaattatgtgtttccgaaatttaccgcatggaggaagtgacggggactaaagggcgccaaagcaaaggggacataaacaccaggaacaacggggagagagcctcctgtgaaagtgacgtcctgcatttcacctccaccaccacgtcgaagaatcgcatcatcataacctggcaccggtaccggccccctgactacagggatctcatcagcttcaccgtttactacaaggaagcaccctttaagaatgtcacagagtatgatgggcaggatgcctgcggctccaacagctggaacatggtggacgtggacctcccgcccaacaaggacgtggagcccggcatcttactacatgggctgaagccctggactcagtacgccgtttacgtcaaggctgtgaccctcaccatggtggagaacgaccatatccgtggggccaagagtgagatcttgtacattcgcaccaatgcttcagttccttccattcccttggacgttctttcagcatcgaactcctcttctcagttaatcgtgaagtggaaccctccctctctgcccaacggcaacctgagttactacattgtgcgctggcagcggcagcctcaggacggctacctttaccggcacaattactgctccaaagacaaaatccccatcaggaagtatgccgacggcaccatcgacattgaggaggtcacagagaaccccaagactgaggtgtgtggtggggagaaagggccttgctgcgcctgccccaaaactgaagccgagaagcaggccgagaaggaggaggctgaataccgcaaagtctttgagaatttcctgcacaactccatcttcgtgcccagacctgaaaggaagcggagagatgtcatgcaagtggccaacaccaccatgtccagccgaagcaggaacaccacggccgcagacacctacaacatcaccgacccggaagagctggagacagagtaccctttctttgagagcagagtggataacaaggagagaactgtcatttctaaccttcggcctttcacattgtaccgcatcgatatccacagctgcaaccacgaggctgagaagctgggctgcagcgcctccaacttcgtctttgcaaggactatgcccgcagaaggagcagatgacattcctgggccagtgacctgggagccaaggcctgaaaactccatctttttaaagtggccggaacctgagaatcccaatggattgattctaatgtatgaaataaaatacggatcacaagttgaggatcagcgagaatgtgtgtccagacaggaatacaggaagtatggaggggccaagctaaaccggctaaacccggggaactacacagcccggattcaggccacatctctctctgggaatgggtcgtggacagatcctgtgttcttctatgtccaggccaaaacaggatatgaaaacttcatccatctgatcatcgctctgcccgtcgctgtcctgttgatcgtgggagggttggtgattatgctgtacgtcttccatagaaagagaaataacagcaggctggggaatggagtgctgtatgcctctgtgaacccggagtacttcagcgctgctgatgtgtacgttcctgatgagtgggaggtggctcgggagaagatcaccatgagccgggaacttgggcaggggtcgtttgggatggtctatgaaggagttgccaagggtgtggtgaaagatgaacctgaaaccagagtggccattaaaacagtgaacgaggccgcaagcatgcgtgagaggattgagtttctcaacgaagcttctgtgatgaaggagttcaattgtcaccatgtggtgcgattgctgggtgtggtgtcccaaggccagccaacactggtcatcatggaactgatgacacggggcgatctcaaaagttatctccggtctctgaggccagaaatggagaataatccagtcctagcacctccaagcctgagcaagatgattcagatggccggagagattgcagacggcatggcatacctcaacgccaataagttcgtccacagagaccttgctgcccggaattgcatggtagccgaagatttcacagtcaaaatcggagattttggtatgacgcgagatatctatgagacagactattaccggaaaggaggcaaagggctgctgcccgtgcgctggatgtctcctgagtccctcaaggatggagtcttcaccacttactcggacgtctggtccttcggggtcgtcctctgggagatcgccacactggccgagcagccctaccagggcttgtccaacgagcaagtccttcgcttcgtcatggagggcggccttctggacaagccagacaactgtcctgacatgctgtttgaactgatgcgcatgtgctggcagtataaccccaagatgaggccttccttcctggagatcatcagcagcatcaaagaggagatggagcctggcttccgggaggtctccttctactacagcgaggagaacaagctgcccgagccggaggagctggacctggagccagagaacatggagagcgtccccctggacccctcggcctcctcgtcctccctgccactgcccgacagacactcaggacacaaggccgagaacggccccggccctggggtgctggtcctccgcgccagcttcgacgagagacagccttacgcccacatgaacgggggccgcaagaacgagcgggccttgccgctgccccagtcttcgacctgctgatccttggatcctgaatctgtgcaaacagtaacgtgtgcgcacgcgcagcggggtggggggggagagagagttttaacaatccattcacaagcctcctgtacctcagtggatcttcagttctgcccttgctgcccgcgggagacagcttctctgcagtaaaacacatttgggatgttccttttttcaatatgcaagcagctttttattccctgcccaaacccttaactgacatgggcctttaagaaccttaatgacaacacttaatagcaacagagcacttgagaaccagtctcctcactctgtccctgtccttccctgttctccctttctctctcctctctgcttcataacggaaaaataattgccacaagtccagctgggaagccctttttatcagtttgaggaagtggctgtccctgtggccccatccaaccactgtacacacccgcctgacaccgtgggtcattacaaaaaaacacgtggagatggaaatttttacctttatctttcacctttctagggacatgaaatttacaaagggccatcgttcatccaaggctgttaccattttaacgctgcctaattttgccaaaatcctgaactttctccctcatcggcccggcgctgattcctcgtgtccggaggcatgggtgagcatggcagctggttgctccatttgagagacacgctggcgacacactccgtccatccgactgcccctgctgtgctgctcaaggccacaggcacacaggtctcattgcttctgactagattattatttgggggaactggacacaataggtctttctctcagtgaaggtggggagaagctgaaccggc

SEQ ID NO: 1307 - DNA, 801 bp; single-stranded, linear
  immediate source library: GENBANK
  immediate source clone: g33780
atcactctctttaatcactactcacagtaacctcaactcctgccacaatgtacaggatgcaactcctgtcttgcattgcactaagtcttgcacttgtcacaaacagtgcacctacttcaagttctacaaagaaaacacagctacaactggagcatttactgctggatttacagatgattttgaatggaattaataattacaagaatcccaaactcaccaggatgctcacatttaagttttacatgcccaagaaggccacagaactgaaacatcttcagtgtctagaagaagaactcaaacctctggaggaagtgctaaatttagctcaaagcaaaaactttcacttaagacccagggacttaatcagcaatatcaacgtaatagttctggaactaaagggatctgaaacaacattcatgtgtgaatatgctgatgagacagcaaccattgtagaatttctgaacagatggattaccttttgtcaaagcatcatctcaacactaacttgataattaagtgcttcccacttaaaacatatcaggccttctatttatttaaatatttaaattttatatttattgttgaatgtatggtttgctacctattgtaactattattcttaatcttaaaactataaatatggatcttttatgattctttttgtaagccctaggggctctaaaatggtttcacttatttatcccaaaatatttattattatgttgaatgttaaatatagtatctatgtagattggttagtaaaactatttaataaatttgataaatataaaaaaaaaaaac

SEQ ID NO: 1308 - DNA, 1124 bp; single-stranded, linear
  immediate source library: GENBANK
  immediate source clone: g33789
ttcgaggcacaaggcacaacaggctgctctgggattctcttcagccaatcttcattgctcaagtgtctgaagcagccatggcagaagtacctgagctcgccagtgaaatgatggcttattacagtggcaatgaggatgacttgttctttgaagctgatggccctaaacagatgaagtgctccttccaggacctggacctctgccctctggatggcggcatccagctacgaatctccgaccaccactacagcaagggcttcaggcaggccgcgtcagttgttgtggccatggacaagctgaggaagatgctggttccctgcccacagaccttccaggagaatgacctgagcaccttctttcccttcatctttgaagaagaacctatcttctttgacacatgggataacgaggcttatgtgcacgatgcacctgtacgatcactgaactgcacgctccgggactcacagcaaaaaagcttggtgatgtctggtccatatgaactgaaagctctccacctccagggacaggatatggagcaacaagtggtgttctccatgtcctttgtacaaggagaagaaagtaatgacaaaatacctgtggccttgggcctcaaggaaaagaatctgtacctgtcctgcgtgttgaaagatgataagcccactctacagctggagagtgtagatcccaaaaattacccaaagaagaagatggaaaagcgatttgtcttcaacaagatagaaatcaataacaagctggaatttgagtctgcccagttccccaactggtacatcagcacctctcaagcagaaaacatgcccgtcttcctgggagggaccaaaggcggccaggatataactgacttcaccatgcaatttgtgtcttcctaaagagagctgtacccagagagtcctgtgctgaatgtggactcaatccctagggctggcagaaagggaacagaaaggtttttgagtacggctatagcctggactttcctgttgtctacaccaatgcccaactgcctgccttagggtagtgctaagaggatctcctgtccatcagccaggacagtcagctctctcctttcagggccaatccccagcccttttgttgagccaggcctctct

SEQ ID NO: 1309 - DNA, 896 bp; single-stranded, linear
  immediate source library: GENBANK
  immediate source clone: g338010
gaattcggcagctccaaccagggcagccttcctgagaagatgcaaccaatcctgcttctgctggccttcctcctgctgcccagggcagatgcaggggagatcatcgggggacatgaggccaagccccactcccgcccctacatggcttatcttatgatctgggatcagaagtctctgaagaggtgcggtggcttcctgatacgagacgacttcgtgctgacagctgctcactgttggggaagctccataaatgtcaccttgggggcccacaatatcaaggaacaggagccgacccagcagtttatccctgtgaaaagagccatcccccatccagcctataatcctaagaacttctccaatgacatcatgctactgcagctggagagaaaggccaagcggaccagagctgtgcagcccctcaggctacctagcaacaaggcccaggtgaagccagggcagacatgcagtgtggccggctgggggcagacggcccccctgggaaaacattcacacacactacaagaggtgaagatgacagtgcaggaagatcgaaagtgcgaatctgacttacgccattattacgacagtaccattgagttgtgcgtgggggacccagagattaaaaagacttcctttaagggggactctggaggccctcttgtgtgtaacaaggtggcccagggcattgtctcctatggacgaaacaatggcatgcctccacgagcctgcaccaaagtctcaagctttgtacactggataaagaaaaccatgaaacgctactaactacaggaagcaaactaagcccccgctgtaatgaaacaccttctctggagccaagtccagatttacactgggagaggtgccagcaactgaataaatacctcttagctgagtgg

SEQ ID NO: 1310 - DNA, 833 bp; single-stranded, linear
  immediate source library: GENBANK
  immediate source clone: g338020
gccgccggcggagaacaggagcatggagggcgggctggggcgtgctgtgtgcttgctgaccggggcctcccgcggcttcggccggacgctggccccgctcctggcctcgctgctgtcgcccggctccgtgcttgtccttagcgcccgcaacgacgaggcactgcgccagctggaggccgagctgggcgccgagcggtctggcctgcgcgtggtgcgggtgcccgccgacctgggcgccgaggccggcttgcagcagctgctcggcgccctgcgcgagctcccccggcccaaggggctgcagcgactgctgcttatcaacaacgcgggctctcttggggatgtgtccaaaggcttcgtggacctgagtgactccactcaagtgaacaactactgggcactgaacttgacctccatgctctgcctgacttccagcgtcctgaaggccttcccggacagtcctggcctcaacagaaccgtggttaacatctcgtccctctgtgccctgcaacctttcaaaggctgggcgctgtactgtgcaggaaaggctgctcgtgatatgctgttccaggtcctggcgctggaggaacctaatgtgagggtgctgaactatgccccaggtcctctggacacagacatgcagcagttggcccgggagacctccgtggacccagacatgcgaaaagggctgcaggagctgaaggcaaaggggaagctggtggattgcaaggtgtcagcccagaaactgctgagcttactggaaaaggacgagttcaagtctggagcccacgtggacttctatgacaaataagcccatgtttttggcttcctgaacc

SEQ ID NO: 1311 - DNA, 2145 bp; single-stranded, linear
  immediate source library: GENBANK
  immediate source clone: g338079
cggcagaactgggaccaccgggggtggtgaggcggcccggcactgggagctgcatctgaggcttagtccctgagctctctgcctgcccagactagctgcacctcctcattccctgcgcccccttcctctccggaagcccccaggatggtgaggtggtttcaccgagacctcagtgggctggatgcagagaccctgctcaagggccgaggtgtccacggtagcttcctggctcggcccagtcgcaagaaccagggtgacttctcgctctccgtcagggtgggggatcaggtgacccatattcggatccagaactcaggggatttctatgacctgtatggaggggagaagtttgcgactctgacagagctggtggagtactacactcagcagcagggtgtggtgcaggaccgcgacggcaccatcatccacctcaagtacccgctgaactgctccgatcccactagtgagaggtggtaccatggccacatgtctggcgggcaggcagagacgctgctgcaggccaagggcgagccctggacgtttcttgtgcgtgagagcctcagccagcctggagacttcgtgctttctgtgctcagtgaccagcccaaggctggcccaggctccccgctcagggtcacccacatcaaggtcatgtgcgagggtggacgctacacagtgggtggtttggagaccttcgacagcctcacggacctggtggagcatttcaagaagacggggattgaggaggcctcaggcgcctttgtctacctgcggcagccgtactatgccacgagggtgaatgcggctgacattgagaaccgagtgttggaactgaacaagaagcaggagtccgaggatacagccaaggctggcttctgggaggagtttgagagtttgcagaagcaggaggtgaagaacttgcaccagcgtctggaagggcaacggccagagaacaagggcaagaaccgctacaagaacattctcccctttgaccacagccgagtgatcctgcagggacgggacagtaacatccccgggtccgactacatcaatgccaactacatcaagaaccagctgctaggccctgatgagaacgctaagacctacatcgccagccagggctgtctggaggccacggtcaatgacttctggcagatggcgtggcaggagaacagccgtgtcatcgtcatgaccacccgagaggtggagaaaggccggaacaaatgcgtcccatactggcccgaggtgggcatgcagcgtgcttatgggccctactctgtgaccaactgcggggagcatgacacaaccgaatacaaactccgtaccttacaggtctccccgctggacaatggagacctgattcgggagatctggcattaccagtacctgagctggcccgaccatggggtccccagtgagcctgggggtgtcctcagcttcctggaccagatcaaccagcggcaggaaagtctgcctcacgcagggcccatcatcgtgcactgcagcgccggcatcggccgcacaggcaccatcattgtcatcgacatgctcatggagaacatctccaccaagggcctggactgtgacattgacatccagaagaccatccagatggtgcgggcgcagcgctcgggcatggtgcagacggaggcgcagtacaagttcatctacgtggccatcgcccagttcattgaaaccactaagaagaagctggaggtcctgcagtcgcagaagggccaggagtcggagtacgggaacatcacctatcccccagccatgaagaatgcccatgccaaggcctcccgcacctcgtccaaacacaaggaggatgtgtatgagaacctgcacactaagaacaagagggaggagaaagtgaagaagcagcggtcagcagacaaggagaagagcaagggttccctcaagaggaagtgagcggtgctgtcctcaggtggccatgcctcagccctgaccctgtggaagcatttcgcgatggacagactcacaacctgaacctaggagtgccccattcttttgtaatttaaatggctgcatcccccccacctctccctgaccctgtatatagcccagccaggccccaggcagggccaacccttctcctcttgtaaataaagccctgggatcact

SEQ ID NO: 1312 - DNA, 2335 bp; single-stranded, linear
  immediate source library: GENBANK
  immediate source clone: g33812
gaattccccccccccccccccgagagactggatggacccacaagggtgacagcccaggcggaccgatcttcccatcccacatcctccggcgcgatgccaaaaagaggctgacggcaactgggccttctgcagagaaagacctccgcttcactgccccggctggtcccaagggtcaggaagatggattcatacctgctgatgtggggactgctcacgttcatcatggtgcctggctgccaggcagagctctgtgacgatgacccgccagagatcccacacgccacattcaaagccatggcctacaaggaaggaaccatgttgaactgtgaatgcaagagaggtttccgcagaataaaaagcgggtcactctatatgctctgtacaggaaactctagccactcgtcctgggacaaccaatgtcaatgcacaagctctgccactcggaacacaacgaaacaagtgacacctcaacctgaagaacagaaagaaaggaaaaccacagaaatgcaaagtccaatgcagccagtggaccaagcgagccttccaggtcactgcagggaacctccaccatgggaaaatgaagccacagagagaatttatcatttcgtggtggggcagatggtttattatcagtgcgtccagggatacagggctctacacagaggtcctgctgagagcgtctgcaaaatgacccacgggaagacaaggtggacccagccccagctcatatgcacaggtgaaatggagaccagtcagtttccaggtgaagagaagcctcaggcaagccccgaaggccgtcctgagagtgagacttcctgcctcgtcacaacaacagattttcaaatacagacagaaatggctgcaaccatggagacgtccatatttacaacagagtaccaggtagcagtggccggctgtgttttcctgctgatcagcgtcctcctcctgagtgggctcacctggcagcggagacagaggaagagtagaagaacaatctagaaaaccaaaagaacaagaatttcttggtaagaagccgggaacagacaacagaagtcatgaagcccaagtgaaatcaaaggtgctaaatggtcgcccaggagacatccgttgtgcttgcctgcgttttggaagctctgaagtcacatcacaggacacggggcagtggcaaccttgtctctatgccagctcagtcccatcagagagcgagcgctacccacttctaaatagcaatttcgccgttgaagaggaagggcaaaaccactagaactctccatcttattttcatgtatatgtgttcattaaagcatgaatggtatggaactctctccaccctatatgtagtataaagaaaagtaggtttacattcatctcattccaacttcccagttcaggagtcccaaggaaagccccagcactaacgtaaatacacaacacacacactctaccctatacaactggacattgtctgcgtggttcctttctcagccgcttctgactgctgattctcccgttcacgttgcctaataaacatccttcaagaactctgggctgctacccagaaatcattttacccttggctcaatcctctaagctaacccccttctactgagccttcagtcttgaatttctaaaaaacagaggccatggcagaataatctttgggtaacttcaaaacggggcagccaaacccatgaggcaatgtcaggaacagaaggatgaatgaggtcccaggcagagaatcatacttagcaaagttttacctgtgcgttactaattggcctctttaagagttagtttctttgggattgctatgaatgataccctgaatttggcctgcactaatttgatgtttacaggtggacacacaaggtgcaaatcaatgcgtacgtttcctgagaagtgtctaaaaacaccaaaaagggatccgtacattcaatgtttatgcaaggaaggaaagaaagaaggaagtgaagagggagaagggatggaggtcacactggtagaacgtaaccacggaaaagagcgcatcaggcctggcacggtggctcaggcctataaccccagctccctaggagaccaaggcgggagcatctcttgaggccaggagtttgagaccagcctgggcagcatagcaagacacatccctacaaaaaattagaaattggctggatgtggtggcatacgcctgtagtcctagccactcaggaggctgaggcaggaggattgcttgagcccaggagttcgaggctgcagtcagtcatgatggcaccactgcactccagcctgggcaacagagcaagatcctgtctttaaggaaaaaaagacaagggaattc

SEQ ID NO: 1313 - DNA, 2435 bp; single-stranded, linear
  immediate source library: GENBANK
  immediate source clone: g338227
cgcgcttctcccagcgcaccgaggaccgcccgggcgcacacaaagccgccgcccgcgccgcaccgcccgcgccgccgcccgcgccagggagggattcggccgccgccgggacaccccgcgcgccccctcggtgctctcggaaggcccacggctcccgggcccgcgggacccccggagcgcctggccgcgccggaggagggcggggagaggaccatgtgagtgggctccggagcctcagcgccgcgcagtttttttgaagaagcaggatgctgatctaaacgtggaaaaagaccagtcctgcctctgttgtagaagacatgtggtgtatataaagtttgtgatcgttggcggaaattttggaatttagataatgggctgtgtgcaatgtaaggataaagaagcaacaaaactgacggaggagagggacggcagcctgaaccagagctctgggtaccgctatggcacagaccccacccctcagcactaccccagcttcggtgtgacctccatccccaactacaacaacttccacgcagccgggggccaaggactcaccgtctttggaggtgtgaactcttcgtctcatacggggaccttgcgtacgagaggaggaacaggagtgacactctttgtggccctttatgactatgaagcacggacagaagatgacctgagttttcacaaaggagaaaaatttcaaatattgaacagctcggaaggagattggtgggaagcccgctccttgacaactggagagacaggttacattcccagcaattatgtggctccagttgactctatccaggcagaagagtggtactttggaaaacttggccgaaaagatgctgagcgacagctattgtcctttggaaacccaagaggtacctttcttatccgcgagagtgaaaccaccaaagggtcctattcactttctatccgtgattgggatgatatgaaaggagaccatgtcaaacattataaaattcgcaaacttgacaatggtggatactacattaccacccgggcccagtttgaaacacttcagcagcttgtacaacattactcagagagagctgcaggtctctgctgccgcctagtagttccctgtcacaaagggatgccaaggcttaccgatctgtctgtcaaaaccaaagatgtctgggaaatccctcgagaatccctgcagttgatcaagagactgggaaatgggcagtttggggaagtatggatgggtacctggaatggaaacacaaaagtagccataaagactcttaaaccaggcacaatgtcccccgaatcattccttgaggaagcgcagatcatgaagaagctgaagcacgacaagctggtccagctctatgcagtggtgtctgaggagcccatctacatcgtcaccgagtatatgaacaaaggaagtttactggatttcttaaaagatggagaaggaagagctctgaaattaccaaatcttgtggacatggcagcacaggtggctgcaggaatggcttacatcgagcgcatgaattatatccatagagatctgcgatcagcaaacattctagtggggaatggactcatatgcaagattgctgacttcggattggcccgattgatagaagacaatgagtacacagcaagacaaggtgcaaagttccccatcaagtggacggcccccgagcgagccctgtacgggaggttcacaatcaagtctgacgtgtggtcttttggaatcttactcacagagctggtcaccaaaggaagagtgccatacccaggcatgaacaaccgggaggtgctggagcaggtggagcgaggctacaggatgccctgcccgcaggactgccccatctctctgcatgagctcatgatccactgctggaaaaaggaccctgaagaacgccccacttttgagtacttgcagagcttcctggaagactactttaccgcgacagagccccagtaccaacctggtgaaaacctgtaaggcccgggtctgcggagagaggccttgtcccagaggctgccccacccctccccattagctttcaattccgtagccagctgctccccagcagcggaaccgccaggatcagattgcatgtgactctgaagctgacgaacttccatggccctcattaatgacagttgtccccaaatccgaactctctgtgaagcattcgagacagaaccttgttatttctcagacttggaaaatgcattgtatcgatgttatgtaaaaggccaaacctctgttcagtgtaaatagttactccagtgccaacaatcctagtgctttccttttttaaaaatgcaaatcctatgtgattttaactctgtcttcacctgattcaactaaaaaaaaaaaagtattattttccaaaagtggcctctttgtctaaaacaataaaattttttttcatgttttaacaaaaacc

SEQ ID NO: 1314 - DNA, 3597 bp; single-stranded, linear
  immediate source library: GENBANK
  immediate source clone: g33833
ggcgaatggagcaggggcgcgcagataattaaagatttacacacagctggaagaaatcatagagaagccgggcgtggtggctcatgcctataatcccagcacttttggaggctgaggcgggcagatcacttgagatcaggagttcgagaccagcctggtgccttggcatctcccaatggggtggctttgctctgggctcctgttccctgtgagctgcctggtcctgctgcaggtggcaagctctgggaacatgaaggtcttgcaggagcccacctgcgtctccgactacatgagcatctctacttgcgagtggaagatgaatggtcccaccaattgcagcaccgagctccgcctgttgtaccagctggtttttctgctctccgaagcccacacgtgtatccctgagaacaacggaggcgcggggtgcgtgtgccacctgctcatggatgacgtggtcagtgcggataactatacactggacctgtgggctgggcagcagctgctgtggaagggctccttcaagcccagcgagcatgtgaaacccagggccccaggaaacctgacagttcacaccaatgtctccgacactctgctgctgacctggagcaacccgtatccccctgacaattacctgtataatcatctcacctatgcagtcaacatttggagtgaaaacgacccggcagatttcagaatctataacgtgacctacctagaaccctccctccgcatcgcagccagcaccctgaagtctgggatttcctacagggcacgggtgagggcctgggctcagtgctataacaccacctggagtgagtggagccccagcaccaagtggcacaactcctacagggagcccttcgagcagcacctcctgctgggcgtcagcgtttcctgcattgtcatcctggccgtctgcctgttgtgctatgtcagcatcaccaagattaagaaagaatggtgggatcagattcccaacccagcccgcagccgcctcgtggctataataatccaggatgctcaggggtcacagtgggagaagcggtcccgaggccaggaaccagccaagtgcccacactggaagaattgtcttaccaagctcttgccctgttttctggagcacaacatgaaaagggatgaagatcctcacaaggctgccaaagagatgcctttccagggctctggaaaatcagcatggtgcccagtggagatcagcaagacagtcctctggccagagagcatcagcgtggtgcgatgtgtggagttgtttgaggccccggtggagtgtgaggaggaggaggaggtagaggaagaaaaagggagcttctgtgcatcgcctgagagcagcagggatgacttccaggagggaagggagggcattgtggcccggctaacagagagcctgttcctggacctgctcggagaggagaatgggggcttttgccagcaggacatgggggagtcatgccttcttccaccttcgggaagtacgagtgctcacatgccctgggatgagttcccaagtgcagggcccaaggaggcacctccctggggcaaggagcagcctctccacctggagccaagtcctcctgccagcccgacccagagtccagacaacctgacttgcacagagacgcccctcgtcatcgcaggcaaccctgcttaccgcagcttcagcaactccctgagccagtcaccgtgtcccagagagctgggtccagacccactgctggccagacacctggaggaagtagaacccgagatgccctgtgtcccccagctctctgagccaaccactgtgccccaacctgagccagaaacctgggagcagatcctccgccgaaatgtcctccagcatggggcagctgcagcccccgtctcggcccccaccagtggctatcaggagtttgtacatgcggtggagcagggtggcacccaggccagtgcggtggtgggcttgggtcccccaggagaggctggttacaaggccttctcaagcctgcttgccagcagtgctgtgtccccagagaaatgtgggtttggggctagcagtggggaagaggggtataagcctttccaagacctcattcctggctgccctggggaccctgccccagtccctgtccccttgttcacctttggactggacagggagccacctcgcagtccgcagagctcacatctcccaagcagctccccagagcacctgggtctggagccgggggaaaaggtagaggacatgccaaagcccccacttccccaggagcaggccacagacccccttgtggacagcctgggcagtggcattgtctactcagcccttacctgccacctgtgcggccacctgaaacagtgtcatggccaggaggatggtggccagacccctgtcatggccagtccttgctgtggctgctgctgtggagacaggtcctcgccccctacaacccccctgagggccccagacccctctccaggtggggttccactggaggccagtctgtgtccggcctccctggcaccctcgggcatctcagagaagagtaaatcctcatcatccttccatcctgcccctggcaatgctcagagctcaagccagacccccaaaatcgtgaactttgtctccgtgggacccacatacatgagggtctcttaggtgcatgtcctcttgttgctgagtctgcagatgaggactagggcttatccatgcctgggaaatgccacctcctggaaggcagccaggctggcagatttccaaaagacttgaagaaccatggtatgaaggtgattggccccactgacgttggcctaacactgggctgcagagactggaccccgcccagcattgggctgggctcgccacatcccatgagagtagagggcactgggtcgccgtgccccacggcaggcccctgcaggaaaactgaggcccttgggcacctcgacttgtgaacgagttgttggctgctccctccacagcttctgcagcagactgtccctgttgtaactgcccaaggcatgttttgcccaccagatcatggcccacgtggaggcccacctgcctctgtctcactgaactagaagccgagcctagaaactaacacagccatcaagggaatgacttgggcggccttgggaaatcgatgagaaattgaacttcagggagggtggtcattgcctagaggtgctcattcatttaacagagcttccttaggttgatgctggaggcagaatcccggctgtcaaggggtgttcagttaaggggagcaacagaggacatgaaaaattgctatgactaaagcagggacaatttgctgccaaacacccatgcccagctgtatggctgggggctcctcgtatgcatggaacccccagaataaatatgctcagccaccctgtgggccgggcaatccagacagcaggcataaggcaccagttaccctgcatgttggcccagacctcaggtgctagggaaggcgggaaccttgggttgagtaatgctcgtctgtgtgttttagtttcatcacctgttatctgtgtttgctgaggagagtggaacagaaggggtggagttttgtataaataaagtttctttgtctc

SEQ ID NO: 1315 - DNA, 2024 bp; single-stranded, linear
  immediate source library: GENBANK
  immediate source clone: g33839
tagatgctggggttgcagccacgagcatagacacgacagacacggtcctcgccatcttctgttgagtactggtcggaacaagaggatcgtctgtagacaggatatgatcatcgtggcgcatgtattactcatccttttgggggccactgagatactgcaagctgacttacttcctgatgaaaagatttcacttctcccacctgtcaatttcaccattaaagttactggtttggctcaagttcttttacaatggaaaccaaatcctgatcaagagcaaaggaatgttaatctagaatatcaagtgaaaataaacgctccaaaagaagatgactatgaaaccagaatcactgaaagcaaatgtgtaaccatcctccacaaaggcttttcagcaagtgtgcggaccatcctgcagaacgaccactcactactggccagcagctgggcttctgctgaacttcatgccccaccagggtctcctggaacctcaattgtgaatttaacttgcaccacaaacactacagaagacaattattcacgtttaaggtcataccaagtttcccttcactgcacctggcttgttggcacagatgcccctgaggacacgcagtattttctctactataggtatggctcttggactgaagaatgccaagaatacagcaaagacacactggggagaaatatcgcatgctggtttcccaggacttttatcctcagcaaagggcgtgactggcttgcggtgcttgttaacggctccagcaagcactctgctatcaggccctttgatcagctgtttgcccttcacgccattgatcaaataaatcctccactgaatgtcacagcagagattgaaggaactcgtctctctatccaatgggagaaaccagtgtctgcttttccaatccattgctttgattatgaagtaaaaatacacaatacaaggaatggatatttgcagatagaaaaattgatgaccaatgcattcatctcaataattgatgatctttctaagtacgatgttcaagtgagagcagcagtgagctccatgtgcagagaggcagggctctggagtgagtggagccaacctatttatgtgggaaatgatgaacacaagcccttgagagagtggtttgtcattgtgattatggcaaccatctgcttcatcttgttaattctctcgcttatctgtaaaatatgtcatttatggatcaagttgtttccaccaattccagcaccaaaaagtaatatcaaagatctctttgtaaccactaactatgagaaagctggaatttaaattcaagcatgttttaacttttggtttaaggtacttgggtgtacctggcagtgttgtaagctctttacattaattaattaactctctaggtactgttatcttcattttataaacaaggcagctgaagttgagagaaataagtaacctgtcctaggtcacacaattaggaaatgacagatctggcagtctatttccaggcagtctatttccacgaggtcatgagtgcgaaagagggactaggggaagaatgattaactccagggagctgacttttctagtgtgcttacctgttttgcatctctcaaggatgtgccatgaagctgtagccaggtggaattgtaccacagccctgacatgaacacctgatggcagctgctgggttggagcctagacaaaaacatgaagaaccatggctgctgcctgagcccatcgtgctgtaattatagaaaaccttctaagggaagaatatgctgatatttttcagataagtaccccttttataaaaatcctccaagttagccctcgattttccatgtaaggaaacagaggctttgagataatgtctgtctcctaagggacaaagccaggacttgatcctgtcttaaaaatgcaaaatgtagtacttcttccatcaaaggtagacatgcactaagggacaggttttggcttggtatcagaatacatttttaaaagctgtgtaagaattgaacgggctgtactagggggtata

SEQ ID NO: 1316 - DNA, 1514 bp; single-stranded, linear
  immediate source library: GENBANK
  immediate source clone: g338444
agactctcaggccttggcaggtgcgtctttcagttcccctcacacttcgggttcctcggggaggaggggctggaaccctagcccatcgtcaggacaaagatgctcaggctgctcttggctctcaacttattcccttcaattcaagtaacaggaaacaagattttggtgaagcagtcgcccatgcttgtagcgtacgacaatgcggtcaaccttagctgcaagtattcctacaatctcttctcaagggagttccgggcatcccttcacaaaggactggatagtgctgtggaagtctgtgttgtatatgggaattactcccagcagcttcaggtttactcaaaaacggggttcaactgtgatgggaaattgggcaatgaatcagtgacattctacctccagaatttgtatgttaaccaaacagatatttacttctgcaaaattgaagttatgtatcctcctccttacctagacaatgagaagagcaatggaaccattatccatgtgaaagggaaacacctttgtccaagtcccctatttcccggaccttctaagcccttttgggtgctggtggtggttggtggagtcctggcttgctatagcttgctagtaacagtggcctttattattttctgggtgaggagtaagaggagcaggctcctgcacagtgactacatgaacatgactccccgccgccccgggcccacccgcaagcattaccagccctatgccccaccacgcgacttcgcagcctatcgctcctgacacggacgcctatccagaagccagccggctggcagcccccatctgctcaatatcactgctctggataggaaatgaccgccatctccagccggccacctcagcccctgttgggccaccaatgccaatttttctcgagtgactagaccaaatatcaagatcattttgagactctgaaatgaagtaaaagagatttcctgtgacaggccaagtcttacagtgccatggcccacattccaacttaccatgtacttagtgacttgactgagaagttagggtagaaaacaaaaagggagtggattctgggagcctcttccctttctcactcacctgcacatctcagtcaagcaaagtgtggtatccacagacattttagttgcagaagaaaggctaggaaatcattccttttggttaaatgggtgtttaatcttttggttagtgggttaaacggggtaagttagagtagggggagggataggaagacatatttaaaaaccattaaaacactgtctcccactcatgaaatgagccacgtagttcctatttaatgctgttttcctttagtttagaaatacatagacattgtcttttatgaattctgatcatatttagtcattttgaccaaatgagggatttggtcaaatgagggattccctcaaagcaatatcaggtaaaccaagttgctttcctcactccctgtcatgagacttcagtgttaatgttcacaatatactttcgaaagaataaaatagttc

SEQ ID NO: 1317 - DNA, 2402 bp; single-stranded, linear
  immediate source library: GENBANK
  immediate source clone: g338633
ggagaggtgcgggccgaatccgagccgagcgagaggaatccggcagtagagagcggactccagccggcggaccctgcagccctcgcctgggacagcggcgcgctgggcaggcgcccaagagagcatcgagcagcggaacccgcgaagccggcccgcagccgcgacccgcgcagcctgccgctctcccgccgccggtccgggcagcatgaggcgcgcggcgctctggctctggctgtgcgcgctggcgctgagcctgcagctggccctgccgcaaattgtggctactaatttgccccctgaagatcaagatggctctggggatgactctgacaacttctccggctcaggtgcaggtgctttgcaagatatcaccttgtcacagcagaccccctccacttggaaggacacgcagctcctgacggctattcccacgtctccagaacccaccggcctggaggctacagctgcctccacctccaccctgccggctggagaggggcccaaggagggagaggctgtagtcctgccagaagtggagcctggcctcaccgcccgggagcaggaggccaccccccgacccagggagaccacacagctcccgaccactcatcaggcctcaacgaccacagccaccacggcccaggagcccgccacctcccacccccacagggacatgcagcctggccaccatgagacctcaacccctgcaggacccagccaagctgaccttcacactccccacacagaggatggaggtccttctgccaccgagagggctgctgaggatggagcctccagtcagctcccagcagcagagggctctggggagcaggacttcacctttgaaacctcgggggagaatacggctgtagtggccgtggagcctgaccgccggaaccagtccccagtggatcagggggccacgggggcctcacagggcctcctggacaggaaagaggtgctgggaggggtcattgccggaggcctcgtggggctcatctttgctgtgtgcctggtgggtttcatgctgtaccgcatgaagaagaaggacgaaggcagctactccttggaggagccgaaacaagccaacggcggggcctaccagaagcccaccaaacaggaggaattctatgcctgacgcgggagccatgcgccccctccgccctgccactcactaggcccccacttgcctcttccttgaagaactgcaggccctggcctcccctgccaccaggccacctccccagcattccagcccctctggtcgctcctgcccacggagtcgtgggtgtgctgggagctccactctgcttctctgacttctgcctggagacttagggcaccaggggtttctcgcataggacctttccaccacagccagcacctggcatcgcaccattctgactcggtttctccaaactgaagcagcctctccccaggtccagctctggaggggagggggatccgactgctttggacctaaatggcctcatgtggctggaagatctgcgggtggggcttggggctcacacacctgtagcacttactggtaggaccaagcatcttgggggggtggccgctgagtggcagggacaggagtcactttgtttcgtggggaggtctaatctagatatcgacttgtttttgcacatgtttcctctagttctttgttcatagcccagtagaccttgttacttctgaggtaagttaagtaagttgattcggtatccccccatcttgcttccctaatctatggtcgggagacagcatcagggttaagaagactttttttttttttttttaaactaggagaaccaaatctggaagccaaaatgtaggcttagtttgtgtgttgtctcttgagtttgtcgctcatgtgtgcaacagggtatggactatctgtctggtggccccgtttctggtggtctgttggcaggctggccagtccaggctgccgtggggccgccgcctctttcaagcagtcgtgcctgtgtccatgcgctcagggccatgctgaggcctgggccgctgccacgttggagaagcccgtgtgagaagtgaatgctgggactcagccttcagacagagaggactgtagggagggcggcaggggcctggagatcctcctgcagaccacncccgtcctgcctgtgcgccgtctccaggggctgcttcctcctggaaattgacgaggggtgtcttgggcagagctggctctgagcgcctccatccaaggccaggttctccgttagctcctgtggccccaccctgggccctgggctggaatcaggaatattttccaaagagtgatagtcttttgcttttggcaaaactctacttaatccaatgggtttttccctgtacagtagattttccaaatgtaataaactttaatataaagt

SEQ ID NO: 1318 - DNA, 5373 bp; single-stranded, linear
  immediate source library: GENBANK
  immediate source clone: g33906
gaattcctgcaaacccagcgcaactacggtcccccggtcagacccaggatggggccagaacggacaggggccgcgccgctgccgctgctgctggtgttagcgctcagtcaaggcattttaaattgttgtttggcctacaatgttggtctcccagaagcaaaaatattttccggtccttcaagtgaacagtttgggtatgcagtgcagcagtttataaatccaaaaggcaactggttactggttggttcaccctggagtggctttcctgagaaccgaatgggagatgtgtataaatgtcctgttgacctatccactgccacatgtgaaaaactaaatttgcaaacttcaacaagcattccaaatgttactgagatgaaaaccaacatgagcctcggcttgatcctcaccaggaacatgggaactggaggttttctcacatgtggtcctctgtgggcacagcaatgtgggaatcagtattacacaacgggtgtgtgttctgacatcagtcctgattttcagctctcagccagcttctcacctgcaactcagccctgcccttccctcatagatgttgtggttgtgtgtgatgaatcaaatagtatttatccttgggatgcagtaaagaattttttggaaaaatttgtacaaggccttgatataggccccacaaagacacaggtggggttaattcagtatgccaataatccaagagttgtgtttaacttgaacacatataaaaccaaagaagaaatgattgtagcaacatcccagacatcccaatatggtggggacctcacaaacacattcggagcaattcaatatgcaagaaaatatgcctattcagcagcttctggtgggcgacgaagtgctacgaaagtaatggtagttgtaactgacggtgaatcacatgatggttcaatgttgaaagctgtgattgatcaatgcaaccatgacaatatactgaggtttggcatagcagttcttgggtacttaaacagaaacgcccttgatactaaaaatttaataaaagaaataaaagcgatcgctagtattccaacagaaagatactttttcaatgtgtctgatgaagcagctctactagaaaaggctgggacattaggagaacaaattttcagcattgaaggtactgttcaaggaggagacaactttcagatggaaatgtcacaagtgggattcagtgcagattactcttctcaaaatgatattctgatgctgggtgcagtgggagcttttggctggagtgggaccattgtccagaagacatctcatggccatttgatctttcctaaacaagcctttgaccaaattctgcaggacagaaatcacagttcatatttaggttactctgtggctgcaatttctactggagaaagcactcactttgttgctggtgctcctcgggcaaattataccggccagatagtgctatatagtgtgaatgagaatggcaatatcacggttattcaggctcaccgaggtgaccagattggctcctattttggtagtgtgctgtgttcagttgatgtggataaagacaccattacagacgtgctcttggtaggtgcaccaatgtacatgagtgacctaaagaaagaggaaggaagagtctacctgtttactatcaaaaagggcattttgggtcagcaccaatttcttgaaggccccgagggcattgaaaacactcgatttggttcagcaattgcagctctttcagacatcaacatggatggctttaatgatgtgattgttggttcaccactagaaaatcagaattctggagctgtatacatttacaatggtcatcagggcactatccgcacaaagtattcccagaaaatcttgggatccgatggagcctttaggagccatctccagtactttgggaggtccttggatggctatggagatttaaatggggattccatcaccgatgtgtctattggtgcctttggacaagtggttcaactctggtcacaaagtattgctgatgtagctatagaagcttcattcacaccagaaaaaatcactttggtcaacaagaatgctcagataattctcaaactctgcttcagtgcaaagttcagacctactaagcaaaacaatcaagtggccattgtatataacatcacacttgatgcagatggattttcatccagagtaacctccagggggttatttaaagaaaacaatgaaaggtgcctgcagaagaatatggtagtaaatcaagcacagagttgccccgagcacatcatttatatacaggagccctctgatgttgtcaactctttggatttgcgtgtggacatcagtctggaaaaccctggcactagccctgcccttgaagcctattctgagactgccaaggtcttcagtattcctttccacaaagactgtggtgaggatggactttgcatttctgatctagtcctagatgtccgacaaataccagctgctcaagaacaaccctttattgtcagcaaccaaaacaaaaggttaacattttcagtaacactgaaaaataaaagggaaagtgcatacaacactggaattgttgttgatttttcagaaaacttgttttttgcatcattctccctaccggttgatgggacagaagtaacatgccaggtggctgcatctcagaagtctgttgcctgcgatgtaggctaccctgctttaaagagagaacaacaggtgacttttactattaactttgacttcaatcttcaaaaccttcagaatcaggcgtctctcagtttccaagccttaagtgaaagccaagaagaaaacaaggctgataatttggtcaacctcaaaattcctctcctgtatgatgctgaaattcacttaacaagatctaccaacataaatttttatgaaatctcttcggatgggaatgttccttcaatcgtgcacagttttgaagatgttggtccaaaattcatcttctccctgaaggtaacaacaggaagtgttccagtaagcatggcaactgtaatcatccacatccctcagtataccaaagaaaagaacccactgatgtacctaactggggtgcaaacagacaaggctggtgacatcagttgtaatgcagatatcaatccactgaaaataggacaaacatcttcttctgtatctttcaaaagtgaaaatttcaggcacaccaaagaattgaactgcagaactgcttcctgtagtaatgttacctgctggttgaaagacgttcacatgaaaggagaatactttgttaatgtgactaccagaatttggaacgggactttcgcatcatcaacgttccagacagtacagctaacggcagctgcagaaatcaacacctataaccctgagatatatgtgattgaagataacactgttacgattcccctgatgataatgaaacctgatgagaaagccgaagtaccaacaggagttataataggaagtataattgctggaatccttttgctgttagctctggttgcaattttatggaagctcggcttcttcaaaagaaaatatgaaaagatgaccaaaaatccagatgagattgatgagaccacagagctcagtagctgaaccagcagacctacctgcagtgggaaccggcagcatcccagccagggtttgctgtttgcgtgcatggatttctttttaaatcccatattttttttatcatgtcgtaggtaaactaacctggtattttaagagaaaactgcaggtcagtttggatgaagaaattgtggggggtgggggaggtgcggggggcaggtagggaaataatagggaaaatacctattttatatgatgggggaaaaaaagtaatctttaaactggctggcccagagtttacattctaatttgcattgtgtcagaaacatgaaatgcttccaagcatgacaacttttaaagaaaaatatgatactctcagattttaagggggaaaactgttctctttaaaatatttgtctttaaacagcaactacagaagtggaagtgcttgatatgtaagtacttccacttgtgtatattttaatgaatattgatgttaacaagaggggaaaacaaaacacaggttttttcaatttatgctgctcatccaaagttgccacagatgatacttccaagtgataattttatttataaactaggtaaaatttgttgttggttccttttataccacggctgccccttccacaccccatcttgctctaatgatcaaaacatgcttgaataactgagcttagagtatacctcctatatgtccatttaagttaggagagggggcgatatagagactaaggcacaaaattttgtttaaaactcagaatataacatttatgtaaaatcccatctgctagaagcccatcctgtgccagaggaaggaaaaggaggaaatttcctttctcttttaggaggcacaacagttctcttctaggatttgtttggctgactggcagtaacctagtgaatttttgaaagatgagtaatttctttggcaaccttcctcctcccttactgaaccactctcccacctcctggtggtaccattattatagaagccctctacagcctgactttctctccagcggtccaaagttatcccctcctttacccctcatccaaagttcccactccttcaggacagctgctgtgcattagatattaggggggaaagtcatctgtttaatttacacacttgcatgaattactgtatataaactccttaacttcagggagctattttcatttagtgctaaacaagtaagaaaaataagctagagtgaatttctaaatgttggaatgttatgggatgtaaacaatgtaaagtaaaacactctcaggatttcaccagaagttacagatgaggcactggaaaccaccaccaaattagcaggtgcaccttctgtggctgtcttgtttctgaagtactttttcttccacaagagtgaatttgacctaggcaagtttgttcaaaaggtagatcctgagatgatttggtcagattgggataaggcccagcaatctgcattttaacaagcaccccagtcactaggatgcagatggaccacactttgagaaacaccacccatttctactttttgcaccttattttctctgttcctgagcccccacattctctaggagaaacttagattaaaattcacagacactacatatctaaagctttgacaagtccttgacctctataaacttcagagtcctcattataaaatgggaagactgagctggagttcagcagtgatgctttttagttttaaaagtctatgatctgatctggacttcctataatacaaatacacaatcctccaagaatttgacttggaaaaggaattc

SEQ ID NO: 1319 - DNA, 5645 bp; single-stranded, linear
  immediate source library: GENBANK
  immediate source clone: g33910
cgcccgcgcgctgcagccccatctcctagcggcagcccaggcgcggagggagcgagtccgccccgaggtaggtccaggacgggcgcacagcagcagccgaggctggccgggagagggaggaagaggatggcagggccacgccccagcccatgggccaggctgctcctggcagccttgatcagcgtcagcctctctgggaccttggcaaaccgctgcaagaaggccccagtgaagagctgcacggagtgtgtccgtgtggataaggactgcgcctactgcacagacgagatgttcagggaccggcgctgcaacacccaggcggagctgctggccgcgggctgccagcgggagagcatcgtggtcatggagagcagcttccaaatcacagaggagacccagattgacaccaccctgcggcgcagccagatgtccccccaaggcctgcgggtccgtctgcggcccggtgaggagcggcattttgagctggaggtgtttgagccactggagagccccgtggacctgtacatcctcatggacttctccaactccatgtccgatgatctggacaacctcaagaagatggggcagaacctggctcgggtcctgagccagctcaccagcgactacactattggatttggcaagtttgtggacaaagtcagcgtcccgcagacggacatgaggcctgagaagctgaaggagccctggcccaacagtgacccccccttctccttcaagaacgtcatcagcctgacagaagatgtggatgagttccggaataaactgcagggagagcggatctcaggcaacctggatgctcctgagggcggcttcgatgccatcctgcagacagctgtgtgcacgagggacattggctggcgcccggacagcacccacctgctggtcttctccaccgagtcagccttccactatgaggctgatggcgccaacgtgctggctggcatcatgagccgcaacgatgaacggtgccacctggacaccacgggcacctacacccagtacaggacacaggactacccgtcggtgcccaccctggtgcgcctgctcgccaagcacaacatcatccccatctttgctgtcaccaactactcctatagctactacgagaagcttcacacctatttccctgtctcctcactgggggtgctgcaggaggactcgtccaacatcgtggagctgctggaggaggccttcaatcggatccgctccaacctggacatccgggccctagacagcccccgaggccttcggacagaggtcacctccaagatgttccagaagacgaggactgggtcctttcacatccggcggggggaagtgggtatataccaggtgcagctgcgggcccttgagcacgtggatgggacgcacgtgtgccagctgccggaggaccagaagggcaacatccatctgaaaccttccttctccgacggcctcaagatggacgcgggcatcatctgtgatgtgtgcacctgcgagctgcaaaaagaggtgcggtcagctcgctgcagcttcaacggagacttcgtgtgcggacagtgtgtgtgcagcgagggctggagtggccagacctgcaactgctccaccggctctctgagtgacattcagccctgcctgcgggagggcgaggacaagccgtgctccggccgtggggagtgccagtgcgggcactgtgtgtgctacggcgaaggccgctacgagggtcagttctgcgagtatgacaacttccagtgtccccgcacttccgggttcctctgcaatgaccgaggacgctgctccatgggccagtgtgtgtgtgagcctggttggacaggcccaagctgtgactgtcccctcagcaatgccacctgcatcgacagcaatgggggcatctgtaatggacgtggccactgtgagtgtggccgctgccactgccaccagcagtcgctctacacggacaccatctgcgagatcaactactcggcgatccacccgggcctctgcgaggacctacgctcctgcgtgcagtgccaggcgtggggcaccggcgagaagaaggggcgcacgtgtgaggaatgcaacttcaaggtcaagatggtggacgagcttaagagagccgaggaggtggtggtgcgctgctccttccgggacgaggatgacgactgcacctacagctacaccatggaaggtgacggcgcccctgggcccaacagcactgtcctggtgcacaagaagaaggactgccctccgggctccttctggtggctcatccccctgctcctcctcctcctgccgctcctggccctgctactgctgctatgctggaagtactgtgcctgctgcaaggcctgcctggcacttctcccgtgctgcaaccgaggtcacatggtgggctttaaggaagaccactacatgctgcgggagaacctgatggcctctgaccacttggacacgcccatgctgcgcagcgggaacctcaagggccgtgacgtggtccgctggaaggtcaccaacaacatgcagcggcctggctttgccactcatgccgccagcatcaaccccacagagctggtgccctacgggctgtccttgcgcctggcccgcctttgcaccgagaacctgctgaagcctgacactcgggagtgcgcccagctgcgccaggaggtggaggagaacctgaacgaggtctacaggcagatctccggtgtacacaagctccagcagaccaagttccggcagcagcccaatgccgggaaaaagcaagaccacaccattgtggacacagtgctgatggcgccccgctcggccaagccggccctgctgaagcttacagagaagcaggtggaacagagggccttccacgacctcaaggtggcccccggctactacaccctcactgcagaccaggacgcccggggcatggtggagttccaggagggcgtggagctggtggacgtacgggtgcccctctttatccggcctgaggatgacgacgagaagcagctgctggtggaggccatcgacgtgcccgcaggcactgccaccctcggccgccgcctggtaaacatcaccatcatcaaggagcaagccagagacgtggtgtcctttgagcagcctgagttctcggtcagccgcggggaccaggtggcccgcatccctgtcatccggcgtgtcctggacggcgggaagtcccaggtctcctaccgcacacaggatggcaccgcgcagggcaaccgggactacatccccgtggagggtgagctgctgttccagcctggggaggcctggaaagagctgcaggtgaagctcctggagctgcaagaagttgactccctcctgcggggccgccaggtccgccgtttccacgtccagctcagcaaccctaagtttggggcccacctgggccagccccactccaccaccatcatcatcagggacccagatgaactggaccggagcttcacgagtcagatgttgtcatcacagccaccccctcacggcgacctgggcgccccgcagaaccccaatgctaaggccgctgggtccaggaagatccatttcaactggctgcccccttctggcaagccaatggggtacagggtaaagtactggattcagggtgactccgaatccgaagcccacctgctcgacagcaaggtgccctcagtggagctcaccaacctgtacccgtattgcgactatgagatgaaggtgtgcgcctacggggctcagggcgagggaccctacagctccctggtgtcctgccgcacccaccaggaagtgcccagcgagccagggcgtctggccttcaatgtcgtctcctccacggtgacccagctgagctgggctgagccggctgagaccaacggtgagatcacagcctacgaggtctgctatggcctggtcaacgatgacaaccgacctattgggcccatgaagaaagtgctggttgacaaccctaagaaccggatgctgcttattgagaaccttcgggagtcccagccctaccgctacacggtgaaggcgcgcaacggggccggctgggggcctgagcgggaggccatcatcaacctggccacccagcccaagaggcccatgtccatccccatcatccctgacatccctatcgtggacgcccagagcggggaggactacgacagcttccttatgtacagcgatgacgttctacgctctccatcgggcagccagaggcccagcgtctccgatgacactgagcacctggtgaatggccggatggactttgccttcccgggcagcaccaactccctgcacaggatgaccacgaccagtgctgctgcctatggcacccacctgagcccacacgtgccccaccgcgtgctaagcacatcctccaccctcacacgggactacaactcactgacccgctcagaacactcacactcgaccacactgccgagggactactccaccctcacctccgtctcctcccacgactctcgcctgactgctggtgtgcccgacacgcccacccgcctggtgttctctgccctggggcccacatctctcagagtgagctggcaggagccgcggtgcgagcggccgctgcagggctacagtgtggagtaccagctgctgaacggcggtgagctgcatcggctcaacatccccaaccctgcccagacctcggtggtggtggaagacctcctgcccaaccactcctacgtgttccgcgtgcgggcccagagccaggaaggctggggccgagagcgtgagggtgtcatcaccattgaatcccaggtgcacccgcagagcccactgtgtcccctgccaggctccgccttcactttgagcactcccagtgccccaggcccgctggtgttcactgccctgagcccagactcgctgcagctgagctgggagcggccacggaggcccaatggggatatcgtcggctacctggtgacctgtgagatggcccaaggaggagggccagccaccgcattccgggtggatggagacagccccgagagccggctgaccgtgccgggcctcagcgagaacgtgccctacaagttcaaggtgcaggccaggaccactgagggcttcgggccagagcgcgagggcatcatcaccatagagtcccaggatggaggacccttcccgcagctgggcagccgtgccgggctcttccagcacccgctgcaaagcgagtacagcagcatcaccaccacccacaccagcgccaccgagcccttcctagtggatgggccgaccctgggggcccagcacctggaggcaggcggctccctcacccggcatgtgacccaggagtttgtgagccggacactgaccaccagcggaacccttagcacccacatggaccaacagttcttccaaacttgaccgcaccctgccccacccccgccatgtcccactaggcgtcctcccgactcctctcccggagcctcctcagctactccatccttgcacccctgggggcccagcccacccgcatgcacagagcaggggctaggtgtctcctgggaggcatgaagggggcaaggtccgtcctctgtgggcccaaacctatttgtaaccaaagagctgggagcagcacaaggacccagcctttgttctgcacttaataaatggttttgctactg

SEQ ID NO: 1320 - DNA, 1172 bp; single-stranded, linear
  immediate source library: GENBANK
  immediate source clone: g33917
gagacattcctcaattgcttagacatattctgagcctacagcagaggaacctccagtctcagcaccatgaatcaaactgcgattctgatttgctgccttatctttctgactctaagtggcattcaaggagtacctctctctagaaccgtacgctgtacctgcatcagcattagtaatcaacctgttaatccaaggtctttagaaaaacttgaaattattcctgcaagccaattttgtccacgtgttgagatcattgctacaatgaaaaagaagggtgagaagagatgtctgaatccagaatcgaaggccatcaagaatttactgaaagcagttagcaaggaaatgtctaaaagatctccttaaaaccagaggggagcaaaatcgatgcagtgcttccaaggatggaccacacagaggctgcctctcccatcacttccctacatggagtatatgtcaagccataattgttcttagtttgcagttacactaaaaggtgaccaatgatggtcaccaaatcagctgctactactcctgtaggaaggttaatgttcatcatcctaagctattcagtaataactctaccctggcactataatgtaagctctactgaggtgctatgttcttagtggatgttctgaccctgcttcaaatatttccctcacctttcccatcttccaagggtactaaggaatctttctgctttggggtttatcagaattctcagaatctcaaataactaaaaggtatgcaatcaaatctgctttttaaagaatgctctttacttcatggacttccactgccatcctcccaaggggcccaaattctttcagtggctacctacatacaattccaaacacatacaggaaggtagaaatatctgaaaatgtatgtgtaagtattcttatttaatgaaagactgtacaaagtataagtcttagatgtatatatttcctatattgttttcagtgtacatggaataacatgtaattaagtactatgtatcaatgagtaacaggaaaattttaaaaatacagatagatatatgctctgcatgttacataagataaatgtgctgaatggttttcaaataaaaatgaggtactctcctggaaatattaagaaagactatctaaatgttgaaagatcaaaaggttaataaagtaattataact

SEQ ID NO: 1321 - DNA, 1160 bp; single-stranded, linear
  immediate source library: GENBANK
  immediate source clone: g339420
cctccgacagcctctccacaggtaccatgaaggtctccgcggcacgcctcgctgtcatcctcattgctactgccctctgcgctcctgcatctgcctccccatattcctcggacaccacaccctgctgctttgcctacattgcccgcccactgccccgtgcccacatcaaggagtatttctacaccagtggcaagtgctccaacccagcagtcgtctttgtcacccgaaagaaccgccaagtgtgtgccaacccagagaagaaatgggttcgggagtacatcaactctttggagatgagctaggatggagagtccttgaacctgaacttacacaaatttgcctgtttctgcttgctcttgtcctagcttgggaggcttcccctcactatcctaccccacccgctccttgaagggcccagattctgaccacgacgagcagcagttacaaaaaccttccccaggctggacgtggtggctcagccttgtaatcccagcactttgggaggccaaggtgggtggatcacttgaggtcaggagttcgagacagcctggccaacatgatgaaaccccatgtgtactaaaaatacaaaaaattagccgggcgtggtagcgggcgcctgtagtcccagctactcgggaggctgaggcaggagaatggcgtgaacccgggagcggagcttgcagtgagccgagatcgcgccactgcactccagcctgggcgacagagcgagactccgtctcaaaaaaaaaaaaaaaaaaaaaaaaaatacaaaaattagccgcgtggtggcccacgcctgtaatcccagctactcgggaggctaaggcaggaaaattgtttgaacccaggaggtggaggctgcagtgagctgagattgtgccacttcactccagcctgggtgacaaagtgagactccgtcacaacaacaacaacaaaaagcttccccaactaaagcctagaagagcttctgaggcgctgctttgtcaaaaggaagtctctaggttctgagctctggctttgccttggctttgcaagggctctgtgacaaggaaggaagtcagcatgcctctagaggcaaggaagggaggaacactgcactcttaagcttccgccgtctcaacccctcacaggagcttactggcaaacatgaaaaatcgggg

SEQ ID NO: 1322 - DNA, 3805 bp; single-stranded, linear
  immediate source library: GENBANK
  immediate source clone: g33945
gaattccgggccgcttagtgttgaatgttccccaccgagagcgcatggcttgggaagcgaggcgcgaacccgggccccgaagccgccgtccgggagacggtgatgctgttgctgtgcctgggggtcccgaccggccgcccctacaacgtggacactgagagcgcgctgctttaccagggcccccacaacacgctgttcggctactcggtcgtgctgcacagccacggggcgaaccgatggctcctagtgggtgcgcccactgccaactggctcgccaacgcttcagtgatcaatcccggggcgatttacagatgcaggatcggaaagaatcccggccagacgtgcgaacagctccagctgggtagccctaatggagaaccttgtggaaagacttgtttggaagagagagacaatcagtggttgggggtcacactttccagacagccaggagaaaatggatccatcgtgacttgtgggcatagatggaaaaatatattttacataaagaatgaaaataagctccccactggtggttgctatggagtgccccctgatttacgaacagaactgagtaaaagaatagctccgtgttatcaagattatgtgaaaaaatttggagaaaattttgcatcatgtcaagctggaatatccagtttttacacaaaggatttaattgtgatgggggccccaggatcatcttactggactggctctctttttgtctacaatataactacaaataaatacaaggcttttttagacaaacaaaatcaagtaaaatttggaagttatttaggatattcagtcggagctggtcattttcggagccagcatactaccgaagtagtcggaggagctcctcaacatgagcagattggtaaggcatatatattcagcattgatgaaaaagaactaaatatcttacatgaaatgaaaggtaaaaagcttggatcgtactttggagcttctgtctgtgctgtggacctcaatgcagatggcttctcagatctgctcgtgggagcacccatgcagagcaccatcagagaggaaggaagagtgtttgtgtacatcaactctggctcgggagcagtaatgaatgcaatggaaacaaacctcgttggaagtgacaaatatgctgcaagatttggggaatctatagttaatcttggcgacattgacaatgatggctttgaagatgttgctatcggagctccacaagaagatgacttgcaaggtgctatttatatttacaatggccgtgcagatgggatctcgtcaaccttctcacagagaattgaaggacttcagatcagcaaatcgttaagtatgtttggacagtctatatcaggacaaattgatgcagataataatggctatgtagatgtagcagttggtgcttttcggtctgattctgctgtcttgctaaggacaagacctgtagtaattgttgacgcttctttaagccaccctgagtcagtaaatagaacgaaatttgactgtgttgaaaatggatggccttctgtgtgcatagatctaacactttgtttctcatataagggcaaggaagttccaggttacattgttttgttttataacatgagtttggatgtgaacagaaaggcagagtctccaccaagattctatttctcttctaatggaacttctgacgtgattacaggaagcatacaggtgtccagcagagaagctaactgtagaacacatcaagcatttatgcggaaagatgtgcgggacatcctcaccccaattcagattgaagctgcttaccaccttggtcctcatgtcatcagtaaacgaagtacagaggaattcccaccacttcagccaattcttcagcagaagaaagaaaaagacataatgaaaaaaacaataaactttgcaaggttttgtgcccatgaaaattgttctgctgatttacaggtttctgcaaagattgggtttttgaagccccatgaaaataaaacatatcttgctgttgggagtatgaagacattgatgttgaatgtgtccttgtttaatgctggagatgatgcatatgaaacgactctacatgtcaaactacccgtgggtctttatttcattaagattttagagctggaagagaagcaaataaactgtgaagtcacagataactctggcgtggtacaacttgactgcagtattggctatatatatgtagatcatctctcaaggatagatattagctttctcctggatgtgagctcactcagcagagcggaagaggacctcagtatcacagtgcatgctacctgtgaaaatgaagaggaaatggacaatctaaagcacagcagagtgactgtagcaatacctttaaaatatgaggttaagctgactgttcatgggtttgtaaacccaacttcatttgtgtatggatcaaatgatgaaaatgagcctgaaacgtgcatggtggagaaaatgaacttaactttccatgttatcaacactggcaatagtatggctcccaatgttagtgtggaaataatggtaccaaattcttttagcccccaaactgataagctgttcaacattttggatgtccagactactactggagaatgccactttgaaaattatcaaagagtgtgtgcattagagcagcaaaagagtgcaatgcagaccttgaaaggcatagtccggttcttgtccaagactgataagaggctattgtactgcataaaagctgatccacattgtttaaatttcttgtgtaattttgggaaaatggaaagtggaaaagaagccagtgttcatatccaactggaaggccggccatccattttagaaatggatgagacttcagcactcaagtttgaaataagagcaacaggttttccagagccaaatccaagagtaattgaactaaacaaggatgagaatgttgcgcatgttctactggaaggactacatcatcaaagacccaaacgttatttcaccatagtgattatttcaagtagcttgctacttggacttattgtacttctgttgatctcatatgttatgtggaaggctggcttctttaaaagacaatacaaatctatcctacaagaagaaaacagaagagacagttggagttatatcaacagtaaaagcaatgatgattaaggacttctttcaaattgagagaatggaaaacagactcaggttgtagtaaagaaatttaaaagacactgtttacaagaaaaaatgaattttgtttggacttcttttactcatgatcttgtgacatattatgtcttcatgcaaggggaaaatctcagcaatgattactctttgagatagaagaactgcaaaggtaataatacagccaaagataatctctcagcttttaaatgggtagagaaacactaaagcattcaatttattcaagaaaagtaagcccttgaagatatcttgaaatgaaagtataactgagttaaattatactggagaagtcttagacttgaaatactacttaccatatgtgcttgcctcagtaaaatgaaccccactgggtgggcagaggttcatttcaaatacatctttgatacttgttcaaaatatgttctttaaaaatataattttttagagagctgttcccaaattttctaacgagtggaccattatcactttaaagccctttatttataatacatttcctacgggctgtgttccaacaaccattttttttcagcagactatgaatattatagtattataggccaaactggcaaacttcagactgaacatgtacactggtttgagcttagtgaaatgacttccggaatct

SEQ ID NO: 1323 - DNA, 3453 bp; single-stranded, linear
  immediate source library: GENBANK
  immediate source clone: g33949
ttcaatgttgatgtgaaaaactcaatgactttcagcggcccggtggaagacatgtttggatatactgttcaacaatatgaaaatgaagaaggaaaatgggtgcttattggttctccgttagttggccaacccaaaaacagaactggagatgtctataagtgtccagttgggagaggtgaatcattaccttgcgtaaagttggatctaccagttaatacatcaattcccaatgtcacagaagtaaaggagaacatgacatttggatcaactttagtcaccaacccaaatggaggatttctggcttgtgggcccttatatgcctatagatgtggacatttgcattacacaactggaatctgttctgacgtcagccccacatttcaagtcgtgaattccattgcccctgtacaagaatgcagcactcaactggacatagtcatagtgctggatggttccaacagtatttacccatgggacagtgttacagcttttttaaatgacctcttgaaaagaatggatattggtcctaaacagacacaggttggaattgtacagtatggagaaaacgtgacccatgagttcaacctcaataagtattcttccaccgaagaggtacttgttgcagcaaagaaaatagtccagagaggtggccgccagactatgacagctcttggaacagacacagcaagaaaggaggcattcacggaagcccggggtgcccgaagaggagttaaaaaagtcatggttattgtgacagatggagagtctcatgacaatcatcgactgaagaaggtcatccaagactgtgaagatgaaaacattcaacggttttccatagctattcttggcagctataaccgaggaaatttaagcactgaaaaatttgtggaggaaataaaatcaattgcaagtgaacccactgaaaagcatttcttcaatgtctctgatgaattggctctagtcaccattgttaaaactctgggagaaagaatatttgccctggaagccacagctgaccagtcagcagcttcatttgaaatggaaatgtctcagactggcttcagtgctcattattcacaggactgggtcatgcttggagcagtaggagcctatgattggaatggaacagttgtcatgcagaaggctagtcaaatcataatccctcgaaacacaacctttaatgttgagtctaccaaaaagaatgaaccgcttgcttcttatttaggttacactgtaaactctgctactgcttcttctggagatgtgctctatattgctggacagcctcggtacaatcatacaggccaggtcattatctacaggatggaagatggaaacatcaaaattctccagacgctcagtggagaacagattggttcctactttggcagtattttaacaacaactgacattgacaaggattctaatactgacattcttctagtcggagcccctatgtacatgggaacagagaaggaggagcaaggaaaagtgtatgtgtatgctctcaatcagacaaggtttgaatatcaaatgagcctggaacctattaagcagacgtgctgttcatctcggcagcacaattcatgcacaacagaaaacaaaaatgagccatgcggggctcgttttggaactgcaattgctgctgtaaaagacctcaatcttgatggatttaatgacatcgtgataggagctccgctggaagatgatcacgggggagctgtgtacatttatcatggaagtggcaagactataaggaaagagtatgcacaacgtattccatcaggtggggatggtaagacactgaaattttttggccagtctatccacggagaaatggatttaaatggtgacggtctgacagatgtgactattgggggccttggtggtgctgccctcttctggtcccgagatgtggccgtagttaaagtgaccatgaattttgagccaaataaagtgaatattcaaaagaaaaactgccatatggagggaaaggaaacagtatgcataaatgctacagtgtgttttgaggttaaattaaagtctaaagaagacacgatttatgaagctgatttgcagtaccgtgtcaccctagattcactaagacaaatatcacgaagttttttctctggaactcaagagagaaaggttcaaaggaacatcacagttcgaaaatcagaatgcactaagcactccttctacatgttggacaagcatgactttcaggactctgtgagaataacgttggactttaatcttaccgatccagaaaatgggcctgttcttgatgattctctaccaaactcagtacatgaatatattccctttgccaaagattgtggaaataaggaaaaatgtatctcagacctcagcctgcatgtcgccaccactgaaaaggacctgctgattgtccgatcccagaatgataagttcaacgttagcctcacagtcaaaaatacaaaggacagtgcctataacaccaggacaatagtgcattattctccaaatctagttttttcaggaattgaggctatccaaaaagacagttgtgaatctaatcataatatcacatgtaaagttggatatcccttcctgagaagaggagagatggtaactttcaaaatattgtttcagtttaacacatcctatctcatggaaaatgtgaccatttatttaagtgcaacaagtgacagcgaagaacctcctgaaaccctttctgataatgtagtaaacatttctatcccggtaaaatatgaagttggactacagttttacagctctgcaagtgaataccacatttcaattgctgccaatgagacagtccctgaagttattaattctactgaggacattggaaatgaaattaatatcttctacttgattagaaaaagtggatcttttccaatgccagagcttaagctgtcaatttcattccccaatatgacatcaaatggttaccctgtgctgtacccaactggattgtcatcttctgagaatgcaaactgcagaccccatatctttgaggatcctttcagtatcaactctggaaagaaaatgactacatcaactgaccatctcaaacgaggcacaattctggactgcaatacatgtaaatttgctaccatcacatgtaatctcacttcttctgacatcagccaagtcaatgtttcgcttatcttgtggaaaccaacttttataaaatcatatttttccagcttaaatcttactataaggggagaacttcggagtgaaaatgcatctctggttttaagtagcagcaatcaaaaaagagagcttgctattcaaatatccaaagatgggctaccgggcagagtgccattatgggtcatcctgctgagtgcttttgccggattgttgctgttaatgctgctcattttagcactgtggaagattggattcttcaaaagaccactgaaaaagaaaatggagaaa

SEQ ID NO: 1324 - DNA, 2826 bp; single-stranded, linear
  immediate source library: GENBANK
  immediate source clone: g339515
ccggttaggggccgccatcccctcagagcgtcgggatatcgggtggcggctcgggacggaggacgcgctagtgttcttctgtgtggcagttcagaatgatggatcaagctagatcagcattctctaacttgtttggtggagaaccattgtcatatacccggttcagcctggctcggcaagtagatggcgataacagtcatgtggagatgaaacttgctgtagatgaagaagaaaatgctgacaataacacaaaggccaatgtcacaaaaccaaaaaggtgtagtggaagtatctgctatgggactattgctgtgatcgtctttttcttgattggatttatgattggctacttgggctattgtaaaggggtagaaccaaaaactgagtgtgagagactggcaggaaccgagtctccagtgagggaggagccaggagaggacttccctgcagcacgtcgcttatattgggatgacctgaagagaaagttgtcggagaaactggacagcacagacttcaccagcaccatcaagctgctgaatgaaaattcatatgtccctcgtgaggctggatctcaaaaagatgaaaatcttgcgttgtatgttgaaaatcaatttcgtgaatttaaactcagcaaagtctggcgtgatcaacattttgttaagattcaggtcaaagacagcgctcaaaactcggtgatcatagttgataagaacggtagacttgtttacctggtggagaatcctgggggttatgtggcgtatagtaaggctgcaacagttactggtaaactggtccatgctaattttggtactaaaaaagattttgaggatttatacactcctgtgaatggatctatagtgattgtcagagcagggaaaatcacgtttgcagaaaaggttgcaaatgctgaaagcttaaatgcaattggtgtgttgatatacatggaccagactaaatttcccattgttaacgcagaactttcattctttggacatgctcatctggggacaggtgacccttacacacctggattcccttccttcaatcacactcagtttccaccatctcggtcatcaggattgcctaatatacctgtccagacaatctccagagctgctgcagaaaagctgtttgggaatatggaaggagactgtccctctgactggaaaacagactctacatgtaggatggtaacctcagaaagcaagaatgtgaagctcactgtgagcaatgtgctgaaagagataaaaattcttaacatctttggagttattaaaggctttgtagaaccagatcactatgttgtagttggggcccagagagatgcatggggccctggagctgcaaaatccggtgtaggcacagctctcctattgaaacttgcccagatgttctcagatatggtcttaaaagatgggtttcagcccagcagaagcattatctttgccagttggagtgctggagactttggatcggttggtgccactgaatggctagagggatacctttcgtccctgcatttaaaggctttcacttatattaatctggataaagcggttcttggtaccagcaacttcaaggtttctgccagcccactgttgtatacgcttattgagaaaacaatgcaaaatgtgaagcatccggttactgggcaatttctatatcaggacagcaactgggccagcaaagttgagaaactcactttagacaatgctgctttccctttccttgcatattctggaatcccagcagtttctttctgtttttgcgaggacacagattatccttatttgggtaccaccatggacacctataaggaactgattgagaggattcctgagttgaacaaagtggcacgagcagctgcagaggtcgctggtcagttcgtgattaaactaacccatgatgttgaattgaacctggactatgagaggtacaacagccaactgctttcatttgtgagggatctgaaccaatacagagcagacataaaggaaatgggcctgagtttacagtggctgtattctgctcgtggagacttcttccgtgctacttccagactaacaacagatttcgggaatgctgagaaaacagacagatttgtcatgaagaaactcaatgatcgtgtcatgagagtggagtatcacttcctctctccctacgtatctccaaaagagtctcctttccgacatgtcttctggggctccggctctcacacgctgccagctttactggagaacttgaaactgcgtaaacaaaataacggtgcttttaatgaaacgctgttcagaaaccagttggctctagctacttggactattcagggagctgcaaatgccctctctggtgacgtttgggacattgacaatgagttttaaatgtgatacccatagcttccatgagaacagcagggtagtctggtttctagacttgtgctgatcgtgctaaattttcagtaggcctacaaaacctgatgttaaaattccatcccatcatcttggtactactagatgtctttaggcagcagcttttaatacagggtagataacctgtacttcaagttaaagtgaataaccacttaaaaaatgtccatgatggaatattcccctatctctagaattttaagtgctttgtaatgggaactgcctctttcctgttgttgttaatgaaaatgtcagaaaccagttatgtgaatgatctctctgaatcctaagggctggtctctgctgaaggttgtaagtggtcgcttactttgagtgatcctccaacttcatttgatgctaaataggagataccaggttgaaagaccttctccaaatgagatct

SEQ ID NO: 1325 - DNA, 2090 bp; single-stranded, linear
  immediate source library: GENBANK
  immediate source clone: g339569
gttggcgaggagtttcctgtttcccccgcagcgctgagttgaagttgagtgagtcactcgcgcgcacggagcgacgacacccccgcgcgtgcacccgctcgggacaggagccggactcctgtgcagcttccctcggccgccgggggcctccccgcgcctcgccggcctccaggcccctcctggctggcgagcgggcgccacatctggcccgcacatctgcgctgccggcccggcgcggggtccggagagggcgcggcgcggagcgcagccaggggtccgggaaggcgccgtccgtgcgctgggggctcggtctatgacgagcagcggggtctgccatgggtcgggggctgctcaggggcctgtggccgctgcacatcgtcctgtggacgcgtatcgccagcacgatcccaccgcacgttcagaagtcggttaataacgacatgatagtcactgacaacaacggtgcagtcaagtttccacaactgtgtaaattttgtgatgtgagattttccacctgtgacaaccagaaatcctgcatgagcaactgcagcatcacctccatctgtgagaagccacaggaagtctgtgtggctgtatggagaaagaatgacgagaacataacactagagacagtttgccatgaccccaagctcccctaccatgactttattctggaagatgctgcttctccaaagtgcattatgaaggaaaaaaaaaagcctggtgagactttcttcatgtgttcctgtagctctgatgagtgcaatgacaacatcatcttctcagaagaatataacaccagcaatcctgacttgttgctagtcatatttcaagtgacaggcatcagcctcctgccaccactgggagttgccatatctgtcatcatcatcttctactgctaccgcgttaaccggcagcagaagctgagttcaacctgggaaaccggcaagacgcggaagctcatggagttcagcgagcactgtgccatcatcctggaagatgaccgctctgacatcagctccacgtgtgccaacaacatcaaccacaacacagagctgctgcccattgagctggacaccctggtggggaaaggtcgctttgctgaggtctataaggccaagctgaagcagaacacttcagagcagtttgagacagtggcagtcaagatctttccctatgaggagtatgcctcttggaagacagagaaggacatcttctcagacatcaatctgaagcatgagaacatactccagttcctgacggctgaggagcggaagacggagttggggaaacaatactggctgatcaccgccttccacgccaagggcaacctacaggagtacctgacgcggcatgtcatcagctgggaggacctgcgcaagctgggcagctccctcgcccgggggattgctcacctccacagtgatcacactccatgtgggaggcccaagatgcccatcgtgcacagggacctcaagagctccaatatcctcgtgaagaacgacctaacctgctgcctgtgtgactttgggctttccctgcgtctggaccctactctgtctgtggatgacctggctaacagtgggcaggtgggaactgcaagatacatggctccagaagtcctagaatccaggatgaatttggagaatgctgagtccttcaagcagaccgatgtctactccatggctctggtgctctgggaaatgacatctcgctgtaatgcagtgggagaagtaaaagattatgagcctccatttggttccaaggtgcgggagcacccctgtgtcgaaagcatgaaggacaacgtgttgagagatcgagggcgaccagaaattcccagcttctggctcaaccaccagggcatccagatggtgtgtgagacgttgactgagtgctgggaccacgacccagaggcccgtctcacagcccagtgtgtggcagaacgcttcagtgagctggagcatctggacaggctctcggggaggagctgctcggaggagaagattcctgaagacggctccctaaacactaccaaatagctcttatggggcaggctgggcatgtccaaagaggctgcccctctcaccaaa

SEQ ID NO: 1326 - DNA, 3653 bp; single-stranded, linear
  immediate source library: GENBANK
  immediate source clone: g339656
ggcagcgcgcagcggcaagaagtgtctgggctgggacggacaggagaggctgtcgccatcggcgtcctgtgcccctctgctccggcacggccctgtcgcagtgcccgcgctttccccggcgcctgcacgcggcgcgcctgggtaacatgcttggggtcctggtccttggcgcgctggccctggccggcctggggttccccgcacccgcagagccgcagccgggtggcagccagtgcgtcgagcacgactgcttcgcgctctacccgggccccgcgaccttcctcaatgccagtcagatctgcgacggactgcggggccacctaatgacagtgcgctcctcggtggctgccgatgtcatttccttgctactgaacggcgacggcggcgttggccgccggcgcctctggatcggcctgcagctgccacccggctgcggcgaccccaagcgcctcgggcccctgcgcggcttccagtgggttacgggagacaacaacaccagctatagcaggtgggcacggctcgacctcaatggggctcccctctgcggcccgttgtgcgtcgctgtctccgctgctgaggccactgtgcccagcgagccgatctgggaggagcagcagtgcgaagtgaaggccgatggcttcctctgcgagttccacttcccagccacctgcaggccactggctgtggagcccggcgccgcggctgccgccgtctcgatcacctacggcaccccgttcgcggcccgcggagcggacttccaggcgctgccggtgggcagctccgccgcggtggctcccctcggcttacagctaatgtgcaccgcgccgcccggagcggtccaggggcactgggccagggaggcgccgggcgcttgggactgcagcgtggagaacggcggctgcgagcacgcgtgcaatgcgatccctggggctccccgctgccagtgcccagccggcgccgccctgcaggcagacgggcgctcctgcaccgcatccgcgacgcagtcctgcaacgacctctgcgagcacttctgcgttcccaaccccgaccagccgggctcctactcgtgcatgtgcgagaccggctaccggctggcggccgaccaacaccggtgcgaggacgtggatgactgcatactggagcccagtccgtgtccgcagcgctgtgtcaacacacagggtggcttcgagtgccactgctaccctaactacgacctggtggacggcgagtgtgtggagcccgtggacccgtgcttcagagccaactgcgagtaccagtgccagcccctgaaccaaactagctacctctgcgtctgcgccgagggcttcgcgcccattccccacgagccgcacaggtgccagatgttttgcaaccagactgcctgtccagccgactgcgaccccaacacccaggctagctgtgagtgccctgaaggctacatcctggacgacggtttcatctgcacggacatcgacgagtgcgaaaacggcggcttctgctccggggtgtgccacaacctccccggtaccttcgagtgcatctgcgggcccgactcggcccttgcccgccacattggcaccgactgtgactccggcaaggtggacggtggcgacagcggctctggcgagcccccgcccagcccgacgcccggctccaccttgactcctccggccgtggggctcgtgcattcgggcttgctcataggcatctccatcgcgagcctgtgcctggtggtggcgcttttggcgctcctctgccacctgcgcaagaagcagggcgccgccagggccaagatggagtacaagtgcgcggccccttccaaggaggtagtgctgcagcacgtgcggaccgagcggacgccgcagagactctgagcggcctccgtccaggagcctggctccgtccaggagcctgtgcctcctcacccccagctttgctaccaaagcaccttagctggcattacagctggagaagaccctccccgcaccccccaagctgttttcttctattccatggctaactggcgagggggtgattagagggaggagaatgagcctcggcctcttccgtgacgtcactggaccactgggcaatgatggcaattttgtaacgaagacacagactgcgatttgtcccaggtcctcactaccgggcgcaggagggtgagcgttattggtcggcagccttctgggcagaccttgacctcgtgggctagggatgactaaaatatttattttttttaagtatttaggtttttgtttgtttcctttgttcttacctgtatgtctccagtatccactttgcacagctctccggtctctctctctctacaaactcccacttgtcatgtgacaggtaaactatcttggtgaatttttttttcctagccctctcacatttatgaagcaagccccacttattccccattcttcctagttttctcctcccaggaactgggccaactcacctgagtcaccctacctgtgcctgaccctacttcttttgctcttagctgtctgctcagacagaacccctacatgaaacagaaacaaaaacactaaaaataaaaatggccatttgctttttcaccagatttgctaatttatcctgaaatttcagattcccagagcaaaataattttaaacaaaggttgagatgtaaaaggtattaaattgatgttgctggactgtcatagaaattacacccaaagaggtatttatctttacttttaaacagtgagcctgaattttgttgctgttttgatttgtactgaaaaatggtaattgttgctaatcttcttatgcaatttccttttttgttattattacttatttttgacagtgttgaaaatgttcagaaggttgctctagattgagagaagagacaaacacctcccaggagacagttcaagaaagcttcaaactgcatgattcatgccaattagcaattgactgtcactgttccttgtcactggtagaccaaaataaaaccagctctactggtcttgtggaattgggagcttgggaatggatcctggaggatgcccaattagggcctagccttaatcaggtcctcagagaatttctaccatttcagagaggccttttggaatgtggcccctgaacaagaattggaagctgccctgcccatgggagctggttagaaatgcagaatcctaggctccaccccatccagttcatgagaatctatatttaacaagatctgcagggggtgtgtctgctcagtaatttgaggacaaccattccagactgcttccaattttctggaatacatgaaatatagatcagttataagtagcaggccaagtcaggcccttattttcaagaaactgaggaattttctttgtgtagctttgctctttggtagaaaaggctaggtacacagctctagacactgccacacagggtctgcaaggtctttggttcagctaagctaggaatgaaatcctgcttcagtgtatggaaataaatgtatcatagaaatgtaacttttgtaagacaaaggttttcctcttctattttgtaaactcaaaatatttgtacatagttatttatttattggagataatctagaacacaggcaaaatccttgcttatgacatcacttgtacaaaataaacaaataacaatgtg

SEQ ID NO: 1327 - DNA, 1062 bp; single-stranded, linear
  immediate source library: GENBANK
  immediate source clone: g339706
ggggccgccgagagccgcagcgccgctcgcccgccgccccccaccccgccgccccgcccggcgaattgcgccccgcgccctcccctcgcgcccccgagacaaagaggagagaaagtttgcgcggccgagcgggcaggtgaggagggtgagccgcgcggaggggcccgcctcggccccggctcagcccccgcccgcgcccccagcccgccgccgcgagcagcgcccggaccccccagcggcggccccgcccgcccagccccccggcccgccatgggcgccgcggcccgcaccctgcggctggcgctcggcctcctgctgctggcgacgctgcttcgcccggccgacgcctgcagctgctccccggtgcacccgcaacaggcgttttgcaatgcagatgtagtgatcagggccaaagcggtcagtgagaaggaagtggactctggaaacgacatttatggcaaccctatcaagaggatccagtatgagatcaagcagataaagatgttcaaagggcctgagaaggatatagagtttatctacacggccccctcctcggcagtgtgtggggtctcgctggacgttggaggaaagaaggaatatctcattgcaggaaaggccgagggggacggcaagatgcacatcaccctctgtgacttcatcgtgccctgggacaccctgagcaccacccagaagaagagcctgaaccacaggtaccagatgggctgcgagtgcaagatcacgcgctgccccatgatcccgtgctacatctcctccccggacgagtgcctctggatggactgggtcacagagaagaacatcaacgggcaccaggccaagttcttcgcctgcatcaagagaagtgacggctcctgtgcgtggtaccgcggcgcggcgccccccaagcaggagtttctcgacatcgaggacccataagcaggcctccaacgcccctgtggccaactgcaaaaaaagcctccaagggtttcgactggtccagctctgacatcccttcctggaaacagcatgaataaaacactcatcccatgggtccaaattaatatg

SEQ ID NO: 1328 - DNA, 1421 bp; single-stranded, linear
  immediate source library: GENBANK
  immediate source clone: g339708
acttactgcgggacggccttggagagtactcgggttcgtgaacttcccggaggcgcaatgagctgcattaacctgcccactgtgctgcccggctcccccagcaagacccgggggcagatccaggtgattctcgggccgatgttctcaggaaaaagcacagagttgatgagacgcgtccgtcgcttccagattgctcagtacaagtgcctggtgatcaagtatgccaaagacactcgctacagcagcagcttctgcacacatgaccggaacaccatggaggcgctgcccgcctgcctgctccgagacgtggcccaggaggccctgggcgtggctgtcataggcatcgacgaggggcagtttttccctgacatcatggagttctgcgaggccatggccaacgccgggaagaccgtaattgtggctgcactggatgggaccttccagaggaagccatttggggccatcctgaacctggtgccgctggccgagagcgtggtgaagctgacggcggtgtgcatggagtgcttccgggaagccgcctataccaagaggctcggcacagagaaggaggtcgaggtgattgggggagcagacaagtaccactccgtgtgtcggctctgctacttcaagaaggcctcaggccagcctgccgggccggacaacaaagagaactgcccagtgccaggaaagccaggggaagccgtggctgccaggaagctctttgccccacagcagattctgcaatgcagccctgccaactgagggacctgcaagggccgcccgctcccttcctgccactgccgcctactggacgctgccctgcatgctgcccagccactccaggaggaagtcgggaggcgtggagggtgaccacaccttggccttctgggaactctcctttgtgtggctgccccacctgccgcatgctccctcctctcctacccactggtctgcttaaagcttccctctcagctgctgggacgatcgcccaggctggagctggccccgcttggtggcctgggatctggcacactccctctccttggggtgagggacagagccccacgctgttgacatcagcctgcttcttcccctctgcggctttcactgctgagtttctgttctccctgggaagcctgtgccagcacctttgagccttggcccacactgaggcttaggcctctctgcctgggatgggctcccaccctcccctgaggatggcctggattcacgccctcttgtttccttttgggctcaaagcccttcctacctctggtgatggtttccacaggaacaacagcatctttcaccaagatgggtggcaccaaccttgctgggacttggatcccaggggcttatctcttcaagtgtggagagggcagggtccacgcctctgctgtagcttatgaaattaactaatt

SEQ ID NO: 1329 - DNA, 1585 bp; single-stranded, linear
  immediate source library: GENBANK
  immediate source clone: g339737
cacaccctgacaagctgccaggcaggttctcttcctctcacatactgacccacggctccaccctctctcccctggaaaggacaccatgagcactgaaagcatgatccgggacgtggagctggccgaggaggcgctccccaagaagacaggggggccccagggctccaggcggtgcttgttcctcagcctcttctccttcctgatcgtggcaggcgccaccacgctcttctgcctgctgcactttggagtgatcggcccccagagggaagagtcccccagggacctctctctaatcagccctctggcccaggcagtcagatcatcttctcgaaccccgagtgacaagcctgtagcccatgttgtagcaaaccctcaagctgaggggcagctccagtggctgaaccgccgggccaatgccctcctggccaatggcgtggagctgagagataaccagctggtggtgccatcagagggcctgtacctcatctactcccaggtcctcttcaagggccaaggctgcccctccacccatgtgctcctcacccacaccatcagccgcatcgccgtctcctaccagaccaaggtcaacctcctctctgccatcaagagcccctgccagagggagaccccagagggggctgaggccaagccctggtatgagcccatctatctgggaggggtcttccagctggagaagggtgaccgactcagcgctgagatcaatcggcccgactatctcgactttgccgagtctgggcaggtctactttgggatcattgccctgtgaggaggacgaacatccaaccttcccaaacgcctcccctgccccaatccctttattaccccctccttcagacaccctcaacctcttctggctcaaaaagagaattgggggcttagggtcggaacccaagcttagaactttaagcaacaagaccaccacttcgaaacctgggattcaggaatgtgtggcctgcacagtgaagtgctggcaaccactaagaattcaaactggggcctccagaactcactggggcctacagctttgatccctgacatctggaatctggagaccagggagcctttggttctggccagaatgctgcaggacttgagaagacctcacctagaaattgacacaagtggaccttaggccttcctctctccagatgtttccagacttccttgagacacggagcccagccctccccatggagccagctccctctatttatgtttgcacttgtgattatttattatttatttattatttatttatttacagatgaatgtatttatttgggagaccggggtatcctgggggacccaatgtaggagctgccttggctcagacatgttttccgtgaaaacggaggctgaacaataggctgttcccatgtagccccctggcctctgtgccttcttttgattatgttttttaaaatattatctgattaagttgtctaaacaatgctgatttggtgaccaactgtcactcattgctgaggcctctgctccccagggagttgtgtctgtaatcggcctactattcagtggcgagaaataaaggttgcttaggaaagaa

SEQ ID NO: 1330 - DNA, 2087 bp; single-stranded, linear
  immediate source library: GENBANK
  immediate source clone: g339744
ctttggggttcaagatcactgggaccaggccgtgatctctatgcccgagtctcaaccctcaactgtcaccccaaagcacttgggacgtcctggacagaccgagtcccgggaagccccagcactgccgctgccacactgccctgagcccaaatgggggagtgagaggccatagctgtctggcatgggcctctccaccgtgcctgacctgctgctgccgctggtgctcctggagctgttggtgggaatatacccctcaggggttattggactggtccctcacctaggggacagggagaagagagatagtgtgtgtccccaaggaaaatatatccaccctcaaaataattcgatttgctgtaccaagtgccacaaaggaacctacttgtacaatgactgtccaggcccggggcaggatacggactgcagggagtgtgagagcggctccttcaccgcttcagaaaaccacctcagacactgcctcagctgctccaaatgccgaaaggaaatgggtcaggtggagatctcttcttgcacagtggaccgggacaccgtgtgtggctgcaggaagaaccagtaccggcattattggagtgaaaaccttttccagtgcttcaattgcagcctctgcctcaatgggaccgtgcacctctcctgccaggagaaacagaacaccgtgtgcacctgccatgcaggtttctttctaagagaaaacgagtgtgtctcctgtagtaactgtaagaaaagcctggagtgcacgaagttgtgcctaccccagattgagaatgttaagggcactgaggactcaggcaccacagtgctgttgcccctggtcattttctttggtctttgccttttatccctcctcttcattggtttaatgtatcgctaccaacggtggaagtccaagctctactccattgtttgtgggaaatcgacacctgaaaaagagggggagcttgaaggaactactactaagcccctggccccaaacccaagcttcagtcccactccaggcttcacccccaccctgggcttcagtcccgtgcccagttccaccttcacctccagctccacctatacccccggtgactgtcccaactttgcggctccccgcagagaggtggcaccaccctatcagggggctgaccccatccttgcgacagccctcgcctccgaccccatccccaacccccttcagaagtgggaggacagcgcccacaagccacagagcctagacactgatgaccccgcgacgctgtacgccgtggtggagaacgtgcccccgttgcgctggaaggaattcgtgcggcgcctagggctgagcgaccacgagatcgatcggctggagctgcagaacgggcgctgcctgcgcgaggcgcaatacagcatgctggcgacctggaggcggcgcacgccgcggcgcgaggccacgctggagctgctgggacgcgtgctccgcgacatggacctgctgggctgcctggaggacatcgaggaggcgctttgcggccccgccgccctcccgcccgcgcccagtcttctcagatgaggctgcgccctgcgggcagctctaaggaccgtcctgcgagatcgccttccaaccccacttttttctggaaaggaggggtcctgcaggggcaagcaggagctagcagccgcctacttggtgctaacccctcgatgtacatagcttttctcagctgcctgcgcgccgccgacagtcagcgctgtgcgcgcggagagaggtgcgccgtgggctcaagagcctgagtgggtggtttgcgaggatgagggacgctatgcctcatgcccgttttgggtgtcctcaccagcaaggctgctcgggggcccctggttcgtccctgagcctttttcacagtgcataagcagttttttttgtttttgttttgttttgttttgtttttaaatcaatcatgttacactaatagaaacttggcactcctgtgccctctgcctggacaagcacatagcaagctgaactgtcctaaggcaggggcgagcacggaacaatggggccttcagctggagctgtggacttttgtacatacactaaaattctgaagtta

SEQ ID NO: 1331 - DNA, 2112 bp; single-stranded, linear
  immediate source library: GENBANK
  immediate source clone: g339755
tctggactgaggctccagttctggcctttggggttcaagatcactgggaccaggccgtgatctctatgcccgagtctcaaccctcaactgtcaccccaaggcacttgggacgtcctggacagaccgagtcccgggaagccccagcactgccgctgccacactgccctgagcccaaatgggggagtgagaggccatagctgtctggcatgggcctctccaccgtgcctgacctgctgctgccactggtgctcctggagctgttggtgggaatatacccctcaggggttattggactggtccctcacctaggggacagggagaagagagatagtgtgtgtccccaaggaaaatatatccaccctcaaaataattcgatttgctgtaccaagtgccacaaaggaacctacttgtacaatgactgtccaggcccggggcaggatacggactgcagggagtgtgagagcggctccttcaccgcttcagaaaaccacctcagacactgcctcagctgctccaaatgccgaaaggaaatgggtcaggtggagatctcttcttgcacagtggaccgggacaccgtgtgtggctgcaggaagaaccagtaccggcattattggagtgaaaaccttttccagtgcttcaattgcagcctctgcctcaatgggaccgtgcacctctcctgccaggagaaacagaacaccgtgtgcacctgccatgcaggtttctttctaagagaaaacgagtgtgtctcctgtagtaactgtaagaaaagcctggagtgcacgaagttgtgcctaccccagattgagaatgttaagggcactgaggactcaggcaccacagtgctgttgcccctggtcattttctttggtctttgccttttatccctcctcttcattggtttaatgtatcgctaccaacggtggaagtccaagctctactccattgtttgtgggaaatcgacacctgaaaaagagggggagcttgaaggaactactactaagcccctggccccaaacccaagcttcagtcccactccaggcttcacccccaccctgggcttcagtcccgtgcccagttccaccttcacctccagctccacctatacccccggtgactgtcccaactttgcggctccccgcagagaggtggcaccaccctatcagggggctgaccccatccttgcgacagccctcgcctccgaccccatccccaacccccttcagaagtgggaggacagcgcccacaagccacagagcctagacactgatgaccccgcgacgctgtacgccgtggtggagaacgtgcccccgttgcgctggaaggaattcgtgcggcgcctagggctgagcgaccacgagatcgatcggctggagctgcagaacgggcgctgcctgcgcgaggcgcaatacagcatgctggcgacctggaggcggcgcacgccgcggcgcgaggccacgctggagctgctgggacgcgtgctccgcgacatggacctgctgggctgcctggaggacatcgaggaggcgctttgcggccccgccgccctcccgcccgcgcccagtcttctcagatgaggctgcgcccctgcgggcagctctaaggaccgtcctgcgagatcgccttccaaccccacttttttctggaaaggaggggtcctgcaggggcaagcaggagctagcagccgcctacttggtgctaacccctcgatgtacatagcttttctcagctgcctgcgcgccgccgacagtcagcgctgtgcgcgcggagagaggtgcgccgtgggctcaagagcctgagtgggtggtttgcgaggatgagggacgctatgcctcatgcccgttttgggtgtcctcaccagcaaggctgctcgggggcccctggttcgtccctgagcctttttcacagtgcataagcagttttttttgtttttgttttgttttgttttgtttttaaatcaatcatgttacactaatagaaacttggcactcctgtgccctctgcctggacaagcacatagcaagctgaactgtcctaaggcaggggcgagcacggaacaatggggccttcagctggagctgtggacttttgtacatacactaaaattctgaagtt

SEQ ID NO: 1332 - DNA, 897 bp; single-stranded, linear
  immediate source library: GENBANK
  immediate source clone: g339782
aagcaaggctcagcctcaagattcacagcatctcagacgcagcctaggccgcaccaggatgtcggacaccgaggagcaggaatatgaggaggagcagccggaagaggaggctgcggaggaggaggaggaagaagaggaacgccccaaaccaagccgccccgtggtgcctcctttgatcccgccaaagatcccagaaggggagcgcgttgacttcgatgacatccaccgcaagcgcatggagaaagacctgctggagctgcagacactcatcgatgtacatttcgagcagcggaagaaggaggaagaggagctggttgccttgaaggagcgcattgagcggcgccggtcagagagagccgagcaacagcgcttcagaactgagaaggaacgcgaacgtcaggctaagctggcggaggagaagatgaggaaggaagaggaagaggccaagaagcgggcagaggatgatgccaagaaaaagaaggtgctgtccaacatgggggcccattttggcggctacctggtcaaggcagaacagaagcgtggtaagcggcagacggggcgggagatgaaggtgcgcatcctctccgagcgtaagaagcctctggacattgactacatgggggaggaacagctccgggagaaagcccaggagctgtcggactggatccaccagctggagtctgagaagttcgacctgatggcgaagctgaaacagcagaaatatgagatcaacgtgctgtacaaccgcatcagccacgcccagaagttccggaagggggcagggaagggccgcgttggaggccgctggaagtgaggatgccgccccggacagtggcacctgggaagcctgggagtgtttgtcccatcggtagcttgaaataaacgctcccctcagac

SEQ ID NO: 1333 - DNA, 5717 bp; single-stranded, linear
  immediate source library: GENBANK
  immediate source clone: g340306
ggctaccgctcccggcttggcgtcccgcgcgcacttcggcgatggcttttccgccgcggcgacggctgcgcctcggtccccgcggcctcccgcttcttctctcgggactcctgctacctctgtgccgcgccttcaacctagacgtggacagtcctgccgagtactctggccccgagggaagttacttcggcttcgccgtggatttcttcgtgcccagcgcgtcttcccggatgtttcttctcgtgggagctcccaaagcaaacaccacccagcctgggattgtggaaggagggcaggtcctcaaatgtgactggtcttctacccgccggtgccagccaattgaatttgatgcaacaggcaatagagattatgccaaggatgatccattggaatttaagtcccatcagtggtttggagcatctgtgaggtcgaaacaggataaaattttggcctgtgccccattgtaccattggagaactgagatgaaacaggagcgagagcctgttggaacatgctttcttcaagatggaacaaagactgttgagtatgctccatgtagatcacaagatattgatgctgatggacagggattttgtcaaggaggattcagcattgattttactaaagctgacagagtacttcttggtggtcctggtagcttttattggcaaggtcagcttatttcggatcaagtggcagaaatcgtatctaaatacgaccccaatgtttacagcatcaagtataataaccaattagcaactcggactgcacaagctatttttgatgacagctatttgggttattctgtggctgtcggagatttcaatggtgatggcatagatgactttgtttcaggagttccaagagcagcaaggactttgggaatggtttatatttatgatgggaagaacatgtcctccttatacaattttactggcgagcagatggctgcatatttcggattttctgtagctgccactgacattaatggagatgattatgcagatgtgtttattggagcacctctcttcatggatcgtggctctgatggcaaactccaagaggtggggcaggtctcagtgtctctacagagagcttcaggagacttccagacgacaaagctgaatggatttgaggtctttgcacggtttggcagtgccatagctcctttgggagatctggaccaggatggtttcaatgatattgcaattgctgctccatatgggggtgaagataaaaaaggaattgtttatatcttcaatggaagatcaacaggcttgaacgcagtcccatctcaaatccttgaagggcagtgggctgctcgaagcatgccaccaagctttggctattcaatgaaaggagccacagatatagacaaaaatggatatccagacttaattgtaggagcttttggtgtagatcgagctatcttatacagggccagaccagttatcactgtaaatgctggtcttgaagtgtaccctagcattttaaatcaagacaataaaacctgctcactgcctggaacagctctcaaagtttcctgttttaatgttaggttctgcttaaaggcagatggcaaaggagtacttcccaggaaacttaatttccaggtggaacttcttttggataaactcaagcaaaagggagcaattcgacgagcactgtttctctacagcaggtccccaagtcactccaagaacatgactatttcaagggggggactgatgcagtgtgaggaattgatagcgtatctgcgggatgaatctgaatttagagacaaactcactccaattactatttttatggaatatcggttggattatagaacagctgctgatacaacaggcttgcaacccattcttaaccagttcacgcctgctaacattagtcgacaggctcacattctacttgactgtggtgaagacaatgtctgtaaacccaagctggaagtttctgtagatagtgatcaaaagaagatctatattggggatgacaaccctctgacattgattgttaaggctcagaatcaaggagaaggtgcctacgaagctgagctcatcgtttccattccactgcaggctgatttcatcggggttgtccgaaacaatgaagccttagcaagactttcctgtgcatttaagacagaaaaccaaactcgccaggtggtatgtgaccttggaaacccaatgaaggctggaactcaactcttagctggtcttcgtttcagtgtgcaccagcagtcagagatggatacttctgtgaaatttgacttacaaatccaaagctcaaatctatttgacaaagtaagcccagttgtatctcacaaagttgatcttgctgttttagctgcagttgagataagaggagtctcgagtcctgatcatatctttcttccgattccaaactgggagcacaaggagaaccctgagactgaagaagatgttgggccagttgttcagcacatctatgagctgagaaacaatggtccaagttcattcagcaaggcaatgctccatcttcagtggccttacaaatataataataacactctgttgtatatccttcattatgatattgatggaccaatgaactgcacttcagatatggagatcaaccctttgagaattaagatctcatctttgcaaacaactgaaaagaatgacacggttgccgggcaaggtgagcgggaccatctcatcactaagcgggatcttgccctcagtgaaggagatattcacactttgggttgtggagttgctcagtgcttgaagattgtctgccaagttgggagattagacagaggaaagagtgcaatcttgtacgtaaagtcattactgtggactgagacttttatgaataaagaaaatcagaatcattcctattctctgaagtcgtctgcttcatttaatgtcatagagtttccttataagaatcttccaattgaggatatcaccaactccacattggttaccactaatgtcacctggggcattcagccagcgcccatgcctgtgcctgtgtgggtgatcattttagcagttctagcaggattgttgctactggctgttttggtatttgtaatgtacaggatgggcttttttaaacgggtccggccacctcaagaagaacaagaaagggagcagcttcaacctcatgaaaatggtgaaggaaactcagaaacttaactgcagtttttaagttatgctacatcttgacccactagaattagcaactttattatagatttaaactttcttcatgaggagtaaaaatccaaggctttactgctgatagtgctaattggcattaaccacaaaatgagaattatatttgtcaaccttctccttataaataagttcagacatacatttaataacatagggtgacttgtgtttttaggtatttaaataataaaatttcaagggatagtttttattcaatgtatataagacaggtagtgcctgatttactactttatataaaatagtacctccttcagttactgtttctgatttaatgtacggaactttatttgttgttgttgttgttgttgttgttgttgttttaaagcagtccaaatttggaccttagcaatcatgtcttttgtataggtacttaatgttaatacatattacactacagtttacttttcagaatactaaagactttataactgcatgaacttggatttttttaatcactcatatggtagaattttataaacacatacatgataccatccaaattcttgcttttaataacaaaggtacaatattttgttttagtatgaaaatctggtagatcctattacacttctgtttatattaaatccacaatattttattacatttttaacttgtataaattttaggtcaaatccttcaagccaacctatactaaaaattagttccataatcacaaatggctcttttgtgtaattgtttaatttcacctgaatatcataatgcttaaagccatatggagttggaaattatttccaaagcatatttattccattgttttagtctggctatttacagtataaaaaaagcattttattaaaatactgtgtagttctttgagatagttgcttatgcatatagtaagtattacattcttagagtagagcagagtttttagttagtattaatttattttcctccattcatgtacttttccttatatttccaaaactgttactgagaatgggtcaagatcagtgagaaatctttacagttgacaggaacctggaccccttaccccaactttatgagtaatgcttggaataaaaaactcttaaggcaactcactgatttacttctagcaatagcatgatgttacaggaatattacctctgtttaagcaaggtaatgtgtaaaatcagtctcggctgtcagaataacttctaaaaggtatttttataagcagttcaagttactgaaaaccttttaaacctttctgaagttcgttagtataaattacttttctaggattattaataaaagccacataggtggcaagttgtagttttatatggctctgtagagtggtgaaccttctagaggaatatatgatttattcacagttcctcaaggcctggggatgatgatcagttatacctatttttgtgcaattacatcatgttgtacattagaaatggagagtttaatagctctttaactgctgtcctcattaggtaatgataaatatttcccttaaataattgactattttgctgtgttttaaaaatgattgaaatttatcttgccatatctcataatttcatgcacaagttgactgagctaatcttgagaatatattcgtaaaataggagcacatttagttgaggtatacaaggtaggactctagacaaaaccttctattttagctttagtgaatttcaaaagtaatgggtcttggagtatagatttttattagtagcttgaaagagcttaatcatatgcagtaagtatttttattaccaataaatttaaaattttttaagaaaaatatttttatcctagggccaagtgttgcctgccaccaatcagtaagttagtctataacaaattttaccctaacagttttaccacctagcaacagtcatttctgaaaatatgttggatagaaagtcactctttggcaaaagtgttagaatttgcttttgtgccatctattccttttatggcatctatcttgaaagtaatcttgtattggagattgaaagatgctgtaatttagaaattaacatgatatcttaaattacctttatgaaatatagttttgtataatagcatagattttccttcaaaaaatgaacatttatatatctacaaaaatatggagaagagcaatttgaaagcctactttctgaagaaaatggtgggatttttttttatcatgattaaatatcaaaaaattgccctatgaaaactttaaatctctaaaacatttgaaatactaccatatttgtgatttattgagaataaaaatccattttgaaatgtaaaatttttatgatctgattcagttttaagaaaacatgaatgaactagaagatattaaaaacatttgacattggtaagaaatattgatactgatattgatttttatataggtatttatttcagaattgatattttgagaaaaatacatgtgagtcattttttctgtttctcttttctcttaacgattatcactgtaattctgaatct

SEQ ID NO: 1334 - DNA, 259 bp; single-stranded, linear
  immediate source library: GENBANK
  immediate source clone: g340396
tgccagctccaactcgtaccccagccacagccccagtccctgcccgagcacagggggcagtgacaggcaaaccccgaggagaaggcaccgagcccagacgaccccgagctggcccagaggagctggggaagatccttcagggtgtggtagtggtgctgagtggcttccagaaccccttccgctccgagctgcgagataaggccctagagcttggggccaagtatcggccagactggacccgggacagcacgcacctcat

SEQ ID NO: 1335 - DNA, 5084 bp; single-stranded, linear
  immediate source library: GENBANK
  immediate source clone: g34084
gatcccatcgcagctaccgcgatgagaggcgctcgcggcgcctgggattttctctgcgttctgctcctactgcttcgcgtccagacaggctcttctcaaccatctgtgagtccaggggaaccgtctccaccatccatccatccaggaaaatcagacttaatagtccgcgtgggcgacgagattaggctgttatgcactgatccgggctttgtcaaatggacttttgagatcctggatgaaacgaatgagaataagcagaatgaatggatcacggaaaaggcagaagccaccaacaccggcaaatacacgtgcaccaacaaacacggcttaagcaattccatttatgtgtttgttagagatcctgccaagcttttccttgttgaccgctccttgtatgggaaagaagacaacgacacgctggtccgctgtcctctcacagacccagaagtgaccaattattccctcaaggggtgccaggggaagcctcttcccaaggacttgaggtttattcctgaccccaaggcgggcatcatgatcaaaagtgtgaaacgcgcctaccatcggctctgtctgcattgttctgtggaccaggagggcaagtcagtgctgtcggaaaaattcatcctgaaagtgaggccagccttcaaagctgtgcctgttgtgtctgtgtccaaagcaagctatcttcttagggaaggggaagaattcacagtgacgtgcacaataaaagatgtgtctagttctgtgtactcaacgtggaaaagagaaaacagtcagactaaactacaggagaaatataatagctggcatcacggtgacttcaattatgaacgtcaggcaacgttgactatcagttcagcgagagttaatgattctggagtgttcatgtgttatgccaataatacttttggatcagcaaatgtcacaacaaccttggaagtagtagataaaggattcattaatatcttccccatgataaacactacagtatttgtaaacgatggagaaaatgtagatttgattgttgaatatgaagcattccccaaacctgaacaccagcagtggatctatatgaacagaaccttcactgataaatgggaagattatcccaagtctgagaatgaaagtaatatcagatacgtaagtgaacttcatctaacgagattaaaaggcaccgaaggaggcacttacacattcctagtgtccaattctgacgtcaatgctgccatagcatttaatgtttatgtgaatacaaaaccagaaatcctgacttacgacaggctcgtgaatggcatgctccaatgtgtggcagcaggattcccagagcccacaatagattggtatttttgtccaggaactgagcagagatgctctgcttctgtactgccagtggatgtgcagacactaaactcatctgggccaccgtttggaaagctagtggttcagagttctatagattctagtgcattcaagcacaatggcacggttgaatgtaaggcttacaacgatgtgggcaagacttctgcctattttaactttgcatttaaaggtaacaacaaagagcaaatccatccccacaccctgttcactcctttgctgattggtttcgtaatcgtagctggcatgatgtgcattattgtgatgattctgacctacaaatatttacagaaacccatgtatgaagtacagtggaaggttgttgaggagataaatggaaacaattatgtttacatagacccaacacaacttccttatgatcacaaatgggagtttcccagaaacaggctgagttttgggaaaaccctgggtgctggagctttcgggaaggttgttgaggcaactgcttatggcttaattaagtcagatgcggccatgactgtcgctgtaaagatgctcaagccgagtgcccatttgacagaacgggaagccctcatgtctgaactcaaagtcctgagttaccttggtaatcacatgaatattgtgaatctacttggagcctgcaccattggagggcccaccctggtcattacagaatattgttgctatggtgatcttttgaattttttgagaagaaaacgtgattcatttatttgttcaaagcaggaagatcatgcagaagctgcactttataagaatcttctgcattcaaaggagtcttcctgcagcgatagtactaatgagtacatggacatgaaacctggagtttcttatgttgtcccaaccaaggccgacaaaaggagatctgtgagaataggctcatacatagaaagagatgtgactcccgccatcatggaggatgacgagttggccctagacttagaagacttgctgagcttttcttaccaggtggcaaagggcatggctttcctcgcctccaagaattgtattcacagagacttggcagccagaaatatcctccttactcatggtcggatcacaaagatttgtgattttggtctagccagagacatcaagaatgattctaattatgtggttaaaggaaacgctcgactacctgtgaagtggatggcacctgaaagcattttcaactgtgtatacacgtttgaaagtgacgtctggtcctatgggatttttctttgggagctgttctctttaggaagcagcccctatcctggaatgccggtcgattctaagttctacaagatgatcaaggaaggcttccggatgctcagccctgaacacgcacctgctgaaatgtatgacataatgaagacttgctgggatgcagatcccctaaaaagaccaacattcaagcaaattgttcagctaattgagaagcagatttcagagagcaccaatcatatttactccaacttagcaaactgcagccccaaccgacagaagcccgtggtagaccattctgtgcggatcaattctgtcggcagcaccgcttcctcctcccagcctctgcttgtgcacgacgatgtctgagcagaatcagtgtttgggtcacccctccaggaatgatctcttcttttggcttccatgatggttattttcttttctttcaacttgcatccaactccaggatagtgggcaccccactgcaatcctgtctttctgagcacactttagtggccgatgatttttgtcatcagccaccatcctattgcaaaggttccaactgtatatattcccaatagcaacgtagcttctaccatgaacagaaaacattctgatttggaaaaagagagggaggtatggactgggggccagagtcctttccaaggcttctccaattctgcccaaaaatatggttgatagtttacctgaataaatggtagtaatcacagttggccttcagaaccatccatagtagtatgatgatacaagattagaagctgaaaacctaagtcctttatgtggaaaacagaacatcattagaacaaaggacagagtatgaacacctgggcttaagaaatctagtatttcatgctgggaatgagacataggccatgaaaaaaatgatccccaagtgtgaacaaaagatgctcttctgtggaccactgcatgagcttttatactaccgacctggtttttaaatagagtttgctattagagcattgaattggagagaaggcctccctagccagcacttgtatatacgcatctataaattgtccgtgttcatacatttgaggggaaaacaccataaggtttcgtttctgtatacaaccctggcattatgtccactgtgtatagaagtagattaagagccatataagtttgaaggaaacagttaataccattttttaaggaaacaatataaccacaaagcacagtttgaacaaaatctcctcttttagctgatgaacttattctgtagattctgtggaacaagcctatcagcttcagaatggcattgtactcaatggatttgatgctgtttgacaaagttactgattcactgcatggctcccacaggagtgggaaaacactgccatcttagtttggattcttatgtagcaggaaataaagtataggtttagcctccttcgcaggcatgtcctggacaccgggccagtatctatatatgtgtatgtacgtttgtatgtgtgtagacaaatatttggaggggtatttttgccctgagtccaagagggtcctttagtacctgaaaagtaacttggctttcattattagtactgctcttgtttcttttcacatagctgtctagagtagcttaccagaagcttccatagtggtgcagaggaagtggaaggcatcagtccctatgtatttgcagttcacctgcacttaaggcactctgttatttagactcatcttactgtacctgttccttagaccttccataatgctactgtctcactgaaacatttaaattttaccctttagactgtagcctggatattattcttgtagtttacctctttaaaaacaaaacaaaacaaaacaaaaaactccccttcctcactgcccaatataaaaggcaaatgtgtacatggcagagtttgtgtgttgtcttgaaagattcaggtatgttgcctttatggtttcccccttctacatttcttagactacatttagagaactgtggccgttatctggaagtaaccatttgcactggagttctatgctctcgcacctttccaaagttaacagattttggggttgtgttgtcacccaagagattgttgtttgccatactttgtctgaaaaattcctttgtgtttctattgacttcaatgatagtaagaaaagtggttgttagttatagatgtctaggtacttcaggggcacttcattgagagttttgtcttgccatactttgtctgaaaaattcctttgtgtttctattgacttcaatgatagtaagaaaagtggttgttagttatagatgtctaggtacttcaggggcacttcattgagagttttgtcaatgtcttttgaatattcccaagcccatgagtccttgaaaatattttttatatatacagtaactttatgtgtaaatacataagcggcgtaagtttaaaggatgttggtgttccacgtgttttattcctgtatgttgtccaattgttgacagttctgaagaattc

SEQ ID NO: 1336 - DNA, 7702 bp; single-stranded, linear
  immediate source library: GENBANK
  immediate source clone: g34266
cgggagcggcgggagcggtggcggcggcagaggcggcggctccagcttcggctccggctcgggctcgggctccggctccggctccggctccggctccagctcgggtggcggtggcgggagcgggaccaggtggaggcggcggcggcagaggagtgggagcagcggccctagcggcttgcggggggacatgcggaccgacggcccctggataggcggaaggagtggaggccctggtgcccggcccttggtgctgagtatccagcaagagtgaccggggtgaagaagcaaagactcggttgattgtcctgggctgtggctggctgtggagctagagccctggatggcccctgagccagccccagggaggacgatggtgccccttgtgcctgcactggtgatgcttggtttggtggcaggcgcccatggtgacagcaaacctgtcttcattaaagtccctgaggaccagactgggctgtcaggaggggtagcctccttcgtgtgccaagctacaggagaacccaagccgcgcatcacatggatgaagaaggggaagaaagtcagctcccagcgcttcgaggtcattgagtttgatgatggggcagggtcagtgcttcggatccagccattgcgggtgcagcgagatgaagccatctatgagtgtacagctactaacagcctgggtgagatcaacactagtgccaagctctcagtgctcgaagaggaacagctgccccctgggttcccttccatcgacatggggcctcagctgaaggtggtggagaaggcacgcacagccaccatgctatgtgccgcaggcggaaatccagaccctgagatttcttggttcaaggacttccttcctgtagaccctgccacgagcaacggccgcatcaagcagctgcgttcaggtgccttgcagatagagagcagtgaggaatccgaccaaggcaagtacgagtgtgtggcgaccaactcggcaggcacacgttactcagcccctgcgaacctgtatgtgcgagtgcgccgcgtggctcctcgtttctccatccctcccagcagccaggaggtgatgccaggcggcagcgtgaacctgacatgcgtggcagtgggtgcacccatgccctacgtgaagtggatgatgggggccgaggagctcaccaaggaggatgagatgccagttggccgcaacgtcctggagctcagcaatgtcgtacgctctgccaactacacctgtgtggccatctcctcgctgggcatgatcgaggccacagcccaggtcacagtgaaagctcttccaaagcctccgattgatcttgtggtgacagagacaactgccaccagtgtcaccctcacctgggactctgggaactcggagcctgtaacctactatggcatccagtaccgcgcagcgggcacggagggcccctttcaggaggtggatggtgtggccaccacccgctacagcattggcggcctcagccctttctcggaatatgccttccgcgtgctggcggtgaacagcatcgggcgagggccgcccagcgaggcagtgcgggcacgcacgggagaacaggcgccctccagcccaccgcgccgcgtgcaggcacgcatgctgagcgccagcaccatgctggtgcagtgggagcctcccgaggagcccaacggcctggtgcggggataccgcgtctactatactccggactcccgccgccccccgaacgcctggcacaagcacaacaccgacgcggggctcctcacgaccgtgggcagcctgctgcctggcatcacctacagcctgcgcgtgcttgccttcaccgccgtgggcgatggccctcccagccccaccatccaggtcaagacgcagcagggagtgcctgcccagcccgcggacttccaggccgaggtggagtcggacaccaggatccagctctcgtggctgctgccccctcaggagcggatcatcatgtatgaactggtgtactgggcggcagaggacgaagaccaacagcacaaggtcaccttcgacccaacctcctcctacacactagaggacctgaagcctgacacactctaccgcttccagctggctgcacgctcggatatgggggtgggcgtcttcacccccaccattgaggcccgcacagcccagtccaccccctccgcccctccccagaaggtgatgtgtgtgagcatgggctccaccacggtccgggtaagttgggtcccgccgcctgccgacagccgcaacggcgttatcacccagtactccgtggcccacgaggcggtggacggcgaggaccgcgggcggcatgtggtggatggcatcagccgtgagcactccagctgggacctggtgggcctggagaagtggacggagtaccgggtgtgggtgcgggcacacacagacgtgggccccggccccgagagcagcccggtgctggtgcgcaccgatgaggacgtgcccagcgggcctccgcggaaggtggaggtggagccactgaactccactgctgtgcatgtctactggaagctgcctgtccccagcaagcagcatggccagatccgcggctaccaggtcacctacgtgcggctggagaatggcgagccccgtggactccccatcatccaagacgtcatgctagccgaggcccagtggcggccagaggagtccgaggactatgaaaccactatcagcggcctgaccccggagaccacctactccgttactgttgctgcctataccaccaagggggatggtgcccgcagcaagcccaaaattgtcactacaacaggtgcagtcccaggccggcccaccatgatgatcagcaccacggccatgaacactgcgctgctccagtggcacccacccaaggaactgcctggcgagctgctgggctaccggctgcagtactgccgggccgacgaggcgcggcccaacaccatagatttcggcaaggatgaccagcacttcacagtcaccggcctgcacaaggggaccacctacatcttccggcttgctgccaagaaccgggctggcttgggtgaggagttcgagaaggagatcaggacccccgaggacctgcccagcggcttcccccaaaacctgcatgtgacaggactgaccacgtctaccacagaactggcctgggacccgccagtgctggcggagaggaacgggcgcatcatcagctacaccgtggtgttccgagacatcaacagccaacaggagctgcagaacatcacgacagacacccgctttacccttactggcctcaagccagacaccacttacgacatcaaggtccgcgcatggaccagcaaaggctctggcccactcagccccagcatccagtcccggaccatgccggtggagcaagtgtttgccaagaacttccgggtggcggctgcaatgaagacgtctgtgctgctcagctgggaggttcccgactcctataagtcagctgtgccctttaagattctgtacaatgggcagagtgtggaggtggacgggcactcgatgcggaagctgatcgcagacctgcagcccaacacagagtactcgtttgtgctgatgaaccgtggcagcagcgcagggggcctgcagcacctggtgtccatccgcacagcccccgacctcctgcctcacaagccgctgcctgcctctgcctacatagaggacggccgcttcgatctctccatgccccatgtgcaagacccctcgcttgtcaggtggttctacattgttgtggtacccattgaccgtgtgggcgggagcatgctgacgccaaggtggagcacacccgaggaactggagctggacgagcttctagaagccatcgagcaaggcggagaggagcagcggcggcggcggcggcaggcagaacgtctgaagccatatgtggctgctcaactggatgtgctcccggagacctttaccttgggggacaagaagaactaccggggcttctacaaccggcccctgtctccggacttgagctaccagtgctttgtgcttgcctccttgaaggaacccatggaccagaagcgctatgcctccagcccctactcggatgagatcgtggtccaggtgacaccagcccagcagcaggaggagccggagatgctgtgggtgacgggtcccgtgctggcagtcatcctcatcatcctcattgtcatcgccatcctcttgttcaaaaggaaaaggacccactctccgtcctctaaggatgagcagtcgatcggactgaaggactccttgctggcccactcctctgaccctgtggagatgcggaggctcaactaccagaccccaggtatgcgagaccacccacccatccccatcaccgacctggcggacaacatcgagcgcctcaaagccaacgatggcctcaagttctcccaggagtatgagtccatcgaccctggacagcagttcacgtgggagaattcaaacctggaggtgaacaagcccaagaaccgctatgcgaatgtcatcgcctacgaccactctcgagtcatccttacctctatcgatggcgtccccgggagtgactacatcaatgccaactacatcgatggctaccgcaagcagaatgcctacatcgccacgcagggccccctgcccgagaccatgggcgatttctggagaatggtgtgggaacagcgcacggccactgtggtcatgatgacacggctggaggagaagtcccgggtaaaatgtgatcagtactggccagcccgtggcaccgagacctgtggccttattcaggtgaccctgttggacacagtggagctggccacatacactgtgcgcaccttcgcactccacaagagtggctccagtgagaagcgtgagctgcgtcagtttcagttcatggcctggccagaccatggagttcctgagtacccaactcccatcctggccttcctacgacgggtcaaggcctgcaaccccctagacgcagggcccatggtggtgcactgcagcgcgggcgtgggccgcaccggctgcttcatcgtgattgatgccatgttggagcggatgaagcacgagaagacggtggacatctatggccacgtgacctgcatgcgatcacagaggaactacatggtgcagacggaggaccagtacgtgttcatccatgaggcgctgctggaggctgccacgtgcggccacacagaggtgcctgcccgcaacctgtatgcccacatccagaagctgggccaagtgcctccaggggagagtgtgaccgccatggagctcgagttcaagttgctggccagctccaaggcccacacgtcccgcttcatcagcgccaacctgccctgcaacaagttcaagaaccggctggtgaacatcatgccctacgaattgacccgtgtgtgtctgcagcccatccgtggtgtggagggctctgactacatcaatgccagcttcctggatggttatagacagcagaaggcctacatagctacacaggggcctctggcagagagcaccgaggacttctggcgcatgctatgggagcacaattccaccatcatcgtcatgctgaccaagcttcgggagatgggcagggagaaatgccaccagtactggccagcagagcgctctgctcgctaccagtactttgttgttgacccgatggctgagtacaacatgccccagtatatcctgcgtgagttcaaggtcacggatgcccgggatgggcagtcaaggacaatccggcagttccagttcacagactggccagagcagggcgtgcccaagacaggcgagggattcattgacttcatcgggcaggtgcataagaccaaggagcagtttggacaggatgggcctatcacggtgcactgcagtgctggcgtgggccgcaccggggtgttcatcactctgagcatcgtcctggagcgcatgcgctatgagggcgtggtcgacatgtttcagaccgtgaagaccctgcgtacacagcgtcctgccatggtgcagacagaggaccagtatcagctgtgctaccgtgcggccctggagtacctcggcagctttgaccactatgcaacgtaactaccgctcccctctcctccgccacccccgccgtggggctccggaggggacccagctcctctgagccataccgaccatcgtccagccctcctacgcagatgctgtcactggcagagcacagcccacggggatcacagcgtttcaggaacgttgccacaccaatcagagagcctagaacatccctgggcaagtggatggcccagcaggcaggcactgtggcccttctgtccaccagacccacctggagcccgcttcaagctctctgttgcgctcccgcatttctcatgcttcttctcatggggtggggttggggcaaagcctcctttttaatacattaagtggggtagactgagggattttagcctcttccctctgatttttcctttcgcgaatccgtatctgcagaatgggccactgtaggggttggggtttattttgttttgttttttttttttttttgtatgacttctgctgaaggacagaacattgccttcctcgtgcagagctggggctgccagcctgagcggaggctcggccgtgggccgggaggcagtgctgatccggctgctcctccagcccttcagacgagatcctgtttcagctaaatgcagggaaactcaatgtttttttaagttttgttttccctttaaagcctttttttaggccacattgacagtggtgggcggggagaagatagggaacactcatccctggtcgtctatcccagtgtgtgtttaacattcacagcccagaaccacagatgtgtctgggagagcctggcaaggcattcctcatcaccatcgtgtttgcaaaggttaaaacaaaaacaaaaaaccacaaaaataaaaaacaaaaaaaacaaaaaacccaaaaaaaaaaaaaaaaagagtcagcccttggcttctgcttcaaaccctcaagaggggaagcaactccgtgtgcctggggttcccgagggagctgctggctgacctgggcccacagagcctggctttggtccccagcattgcagtatggtgtggtgtttgtaggctgtggggtctggctgtgtggccaaggtgaatagcacaggttagggtgtgtgccacaccccatgcacctcagggccaagcgggggcgtggctggcctttcaggtccaggccagtgggcctggtagcacatgtctgtcctcagagcaggggccagatgattttcctccctggtttgcagctgttttcaaagcccccgataatcgctcttttccactccaagatgccctcataaaccaatgtggcaagactactggacttctatcaatggtactctaatcagtccttattatcccagcttgctgaggggcagggagagcgcctcttcctctgggcagcgctatctagataggtaagtgggggcggggaagggtgcatagctgttttagctgagggacgtggtgccgacgtccccaaacctagctaggctaagtcaagatcaacattccagggttggtaatgttggatgatgaaacattcatttttaccttgtggatgctagtgctgtagagttcactgttgtacacagtctgttttctatttgttaagaaaaactacagcatcattgcataattcttgatggtaataaatttgaataatcagatttct

SEQ ID NO: 1337 - DNA, 4597 bp; single-stranded, linear
  immediate source library: GENBANK
  immediate source clone: g34275
cgacattttaactgaactgcgggataaagtgaaatctttccgtgcagctctacgagaggaggaaattgttcctcgtctgataagacaacagtggagaaaggacgcatgctgtttcttagggacacggctgacttccagatatgaccatgtatttgtggcttaaactcttggcatttggctttgcctttctggacacagaagtatttgtgacagggcaaagcccaacaccttcccccactgatgcctaccttaatgcctctgaaacaaccactctgagcccttctggaagcgctgtcatttcaaccacaacaatagctactactccatctaagccaacatgtgatgaaaaatatgcaaacatcactgtggattacttatataacaaggaaactaaattatttacagcaaagctaaatgttaatgagaatgtggaatgtggaaacaatacttgcacaaacaatgaggtgcataaccttacagaatgtaaaaatgcgtctgtttccatatctcataattcatgtactgctcctgataagacattaatattagatgtgccaccaggggttgaaaagtttcagttacatgattgtacacaagttgaaaaagcagatactactatttgtttaaaatggaaaaatattgaaacctttacttgtgatacacagaatattacctacagatttcagtgtggtaatatgatatttgataataaagaaattaaattagaaaaccttgaacccgaacatgagtataagtgtgactcagaaatactctataataaccacaagtttactaacgcaagtaaaattattaaaacagattttgggagtccaggagagcctcagattattttttgtagaagtgaagctgcacatcaaggagtaattacctggaatccccctcaaagatcatttcataattttaccctctgttatataaaagagacagaaaaagattgcctcaatctggataaaaacctgatcaaatatgatttgcaaaatttaaaaccttatacgaaatatgttttatcattacatgcctacatcattgcaaaagtgcaacgtaatggaagtgctgcaatgtgtcatttcacaactaaaagtgctcctccaagccaggtctggaacatgactgtctccatgacatcagataatagtatgcatgtcaagtgtaggcctcccagggaccgtaatggcccccatgaacgttaccatttggaagttgaagctggaaatactctggttagaaatgagtcgcataagaattgcgatttccgtgtaaaagatcttcaatattcaacagactacacttttaaggcctattttcacaatggagactatcctggagaaccctttattttacatcattcaacatcttataattctaaggcactgatagcatttctggcatttctgattattgtgacatcaatagccctgcttgttgttctctacaaaatctatgatctacataagaaaagatcctgcaatttagatgaacagcaggagcttgttgaaagggatgatgaaaaacaactgatgaatgtggagccaatccatgcagatattttgttggaaacttataagaggaagattgctgatgaaggaagactttttctggctgaatttcagagcatcccgcgggtgttcagcaagtttcctataaaggaagctcgaaagccctttaaccagaataaaaaccgttatgttgacattcttccttatgattataaccgtgttgaactctctgagataaacggagatgcagggtcaaactacataaatgccagctatattgatggtttcaaagaacccaggaaatacattgctgcacaaggtcccagggatgaaactgttgatgatttctggaggatgatttgggaacagaaagccacagttattgtcatggtcactcgatgtgaagaaggaaacaggaacaagtgtgcagaatactggccgtcaatggaagagggcactcgggcttttggagatgttgttgtaaagatcaaccagcacaaaagatgtccagattacatcattcagaaattgaacattgtaaataaaaaagaaaaagcaactggaagagaggtgactcacattcagttcaccagctggccagaccacggggtgcctgaggatcctcacttgctcctcaaactgagaaggagagtgaatgccttcagcaatttcttcagtggtcccattgtggtgcactgcagtgctggtgttgggcgcacaggaacctatatcggaattgatgccatgctagaaggcctggaagccgagaacaaagtggatgtttatggttatgttgtcaagctaaggcgacagagatgcctgatggttcaagtagaggcccagtacatcttgatccatcaggctttggtggaatacaatcagtttggagaaacagaagtgaatttgtctgaattacatccatatctacataacatgaagaaaagggatccacccagtgagccgtctccactagaggctgaattccagagacttccttcatataggagctggaggacacagcacattggaaatcaagaagaaaataaaagtaaaaacaggaattctaatgtcatcccatatgactataacagagtgccacttaaacatgagctggaaatgagtaaagagagtgagcatgattcagatgaatcctctgatgatgacagtgattcagaggaaccaagcaaatacatcaatgcatcttttataatgagctactggaaacctgaagtgatgattgctgctcagggaccactgaaggagaccattggtgacttttggcagatgatcttccaaagaaaagtcaaagttattgttatgctgacagaactgaaacatggagaccaggaaatctgtgctcagtactggggagaaggaaagcaaacatatggagatattgaagttgacctgaaagacacagacaaatcttcaacttatacccttcgtgtctttgaactgagacattccaagaggaaagactctcgaactgtgtaccagtaccaatatacaaactggagtgtggagcagcttcctgcagaacccaaggaattaatctctatgattcaggtcgtcaaacaaaaacttccccagaagaattcctctgaagggaacaagcatcacaagagtacacctctactcattcactgcagggatggatctcagcaaacgggaatattttgtgctttgttaaatctcttagaaagtgcggaaacagaagaggtagtggatatttttcaagtggtaaaagctctacgcaaagctaggccaggcatggtttccacattcgagcaatatcaattcctatatgacgtcattgccagcacctaccctgctcagaatggacaagtaaagaaaaacaaccatcaagaagataaaattgaatttgataatgaagtggacaaagtaaagcaggatgctaattgtgttaatccacttggtgccccagaaaagctccctgaagcaaaggaacaggctgaaggttctgaacccacgagtggcactgaggggccagaacattctgtcaatggtcctgcaagtccagccttaaatcaaggttcataggaaaagacataaatgaggaaactccaaacctcctgttagctgttatttctatttttgtagaagtaggaagtgaaaataggtatacagtggattaattaaatgcagcgaaccaatatttgtagaagggttatattttactactgtggaaaaatatttaagatagttttgccagaacagtttgtacagacgtatgcttattttaaaattttatctcttattcagtaaaaaacaacttctttgtaatcgttatgtgtgtatatgtatgtgtgtatgggtgtgtgtttgtgtgagagacagagaaagagagagaattctttcaagtgaatctaaaagcttttgcttttcctttgtttttatgaagaaaaaatacattttatattagaagtgttaacttagcttgaaggatctgtttttaaaaatcataaactgtgtgcagactcaataaaatcatgtacatttctgaaatgacctcaagatgtcctccttgttctactcatatatatctatcttatatacttactattttacttctagagatagtacataaaggtggtatgtgtgtgtatgctactacaaaaaagttgttaactaaattaacattgggaaatcttatattccatatattagcatttagtccaatgtctttttaagcttatttaattaaaaaatttccagtgagcttatcatgctgtctttacatggggttttcaattttgcatgctcgattattccctgtacaatatttaaaatttattgcttgatacttttgacaacaaattaggttttgtacaattgaacttaaataaatgtcattaaaataaataaatgcaatatgtattaatattcattgtataaaaatagaagaatacaaacatatttgttaaatatttacatatgaaatttaatatagctatttttatggaatttttcattgatatgaaaaatatgatattgcatatgcatagttcccatgttaaatcccattcataactttcattaaagcatttactttgaatttc

SEQ ID NO: 1338 - DNA, 4315 bp; single-stranded, linear
  immediate source library: GENBANK
  immediate source clone: g34280
ggaaattgttcctcgtctgataagacaacagtggagaaaggacgcatgctgtttcttagggacacggctggcttccagatatgaccatgtatttgtggcttaaactcttggcatttggctttgcctttctggacacagaagtatttgtgacagggcaaagcccaacaccttcccccactggattgactacagcaaagatgcccagtgttccactttcaagtgaccccttacctactcacaccactgcattctcacccgcaagcacctttgaaagagaaaatgacttctcagagaccacaacttctcttagtccagacaatacttccacccaagtatccccggactctttggataatgctagtgcttttaataccacaggtgtttcatcagtacagacgcctcaccttcccacgcacgcagactcgcagacgccctctgctggaactgacacgcagacattcagcggctccgccgccaatgcaaaactcaaccctaccccaggcagcaatgctatctcagatgtcccaggagagaggagtacagccagcacctttcctacagacccagtttccccattgacaaccaccctcagccttgcacaccacagctctgctgccttacctgcacgcacctccaacaccaccatcacagcgaacacctcagatgcctaccttaatgcctctgaaacaaccactctgagcccttctggaagcgctgtcatttcaaccacaacaatagctactactccatctaagccaacatgtgatgaaaaatatgcaaacatcactgtggattacttatataacaaggaaactaaattatttacagcaaagctaaatgttaatgagaatgtggaatgtggaaacaatacttgcacaaacaatgaggtgcataaccttacagaatgtaaaaatgcgtctgtttccatatctcataattcatgtactgctcctgataagacattaatattagatgtgccaccaggggttgaaaagtttcagttacatgattgtacacaagttgaaaaagcagatactactatttgtttaaaatggaaaaatattgaaacctttacttgtgatacacagaatattacctacagatttcagtgtggtaatatgatatttgataataaagaaattaaattagaaaaccttgaacccgaacatgagtataagtgtgactcagaaatactctataataaccacaagtttactaacgcaagtaaaattattaaaacagattttgggagtccaggagagcctcagattattttttgtagaagtgaagctgcacatcaaggagtaattacctggaatccccctcaaagatcatttcataattttaccctctgttatataaaagagacagaaaaagattgcctcaatctggataaaaacctgatcaaatatgatttgcaaaatttaaaaccttatacgaaatatgttttatcattacatgcctacatcattgcaaaagtgcaacgtaatggaagtgctgcaatgtgtcatttcacaactaaaagtgctcctccaagccaggtctggaacatgactgtctccatgacatcagataatagtatgcatgtcaagtgtaggcctcccagggaccgtaatggcccccatgaacgttaccatttggaagttgaagctggaaatactctggttagaaatgagtcgcataagaattgcgatttccgtgtaaaagatcttcaatattcaacagactacacttttaaggcctattttcacaatggagactatcctggagaaccctttattttacatcattcaacatcttataattctaaggcactgatagcatttctggcatttctgattattgtgacatcaatagccctgcttgttgttctctacaaaatctatgatctacataagaaaagatcctgcaatttagatgaacagcaggagcttgttgaaagggatgatgaaaaacaactgatgaatgtggagccaatccatgcagatattttgttggaaacttataagaggaagattgctgatgaaggaagaccttttctggctgaatttcagagcatcccgcgggtgttcagcaagtttcctataaaggaagctcgaaagccctttaaccagaataaaaaccgttatgttgacattcttccttatgattataaccgtgttgaactctctgagataaacggagatgcagggtcaaactacataaatgccagctatattgatggtttcaaagaacccaggaaatacattgctgcacaaggtcccagggatgaaactgttgatgatttctggaggatgatttgggaacagaaagccacagttattgtcatggtcactcgatgtgaagaaggaaacaggaacaagtgtgcagaatactggccgtcaatggaagagggcactcgggcttttggagatgttgttgtaaagatcaaccagcacaaaagatgtccagattacatcattcagaaattgaacattgtaaataaaaaagaaaaagcaactggaagagaggtgactcacattcagttcaccagctggccagaccacggggtgcctgaggatcctcacttgctcctcaaactgagaaggagagtgaatgccttcagcaatttcttcagtggtcccattgtggtgcactgcagtgctggtgttgggcgcacaggaacctatatcggaattgatgccatgctagaaggcttggaagccgagaacaaagtggatgtttatggttatgttgtcaagctaaggcgacagagatgcctgatggttcaagtagaggcccagtacatcttgatccatcaggctttggtggaatacaatcagtttggagaaacagaagtgaatttgtctgaattacatccatatctacataacatgaagaaaagggatccacccagtgagccgtctccactagaggctgaattccagagacttccttcatataggagctggaggacacagcacattggaaatcaagaagaaaataaaagtaaaaacaggaattctaatgtcatcccatatgactataacagagtgccacttaaacatgagctggaaatgagtaaagagagtgagcatgattcagatgaatcctctgatgatgacagtgattcagaggaaccaagcaaatacatcaatgcatcttttataatgagctactggaaacctgaagtgatgattgctgctcagggaccactgaaggagaccattggtgacttttggcagatgatcttccaaagaaaagtcaaagttattgttatgctgacagaactgaaacatggagaccaggaaatctgtgctcagtactggggagaaggaaagcaaacatatggagatattgaagttgacctgaaagacacagacaaatcttcaacttatacccttcgtgtctttgaactgagacattccaagaggaaagactctcgaactgtgtaccagtaccaatatacaaactggagtgtggagcagcttcctgcagaacccaaggaattaatctctatgattcaggtcgtcaaacaaaaacttccccagaagaattcctctgaagggaacaagcatcacaagagtacacctctactcattcactgcagggatggatctcagcaaacgggaatattttgtgctttgttaaatctcttagaaagtgcggaaacagaagaggtagtggatatttttcaagtggtaaaagctctacgcaaagctaggctaggcatggtttccacattcgagcaatatcaattcctatatgacgtcattgccagcacctaccctgctcagaatggacaagtaaagaaaaacaaccatcaagaagataaaattgaatttgataatgaagtggacaaagtaaagcaggatgctaattgtgttaatccacttggtgccccagaaaagctccctgaagcaaaggaacaggctgaaggttctgaacccacgagtggcactgaggggccagaacattctgtcaatggtcctgcaagtccagctttaaatcaaggttcataggaaaagacataaatgaggaaactccaaacctcctgttagctgttatttctatttttgtagaagtaggaagtgaaaataggtatacagtggattaattaaatgcagcgaaccaatatttgtagaagggttatattttactactgtggaaaaatatttaagatagttttgccagaacagtttgtacagacgtatgcttattttaaaattttatctcttattcagtaaaaaacaacttctttgtaatcgttatgagtgtatatgtatgtgtgtatgggtgtgtgtttgtgtgagagacagagaaagagagagaattc

SEQ ID NO: 1339 - DNA, 892 bp; single-stranded, linear
  immediate source library: GENBANK
  immediate source clone: g34288
gcaaacattctggtgtctgacaccctgagctgcaagattgcagactttggcctagcacgcctcattgaggacaacgagtacacagccagggagggggccaagtttcccattaagtggacagcgccagaagccattaactacgggacattcaccatcaagtcagatgtgtggtcttttgggatcctgctgacggaaattgtcacccacggccgcatcccttacccagggatgaccaacccggaggtgattcagaacctggagcgaggctaccgcatggtgcgccctgacaactgtccagaggagctgtaccaacatatgaggctgtgctggaaggagcgcccagaggaccggcccacctttgactacctgcgcagtgtgctggaggacttcttcacggccacagagggccagtaccagcctcagccttgagaggccttgagaggcctggggttctccccctttctctccagcctgacttggggagaatggagttcttgtgccatagtcacatggcctatgcacattatggactctgcacatgaatcccacccaccatgtgacacatatgcaccttgtgtctgtacagtgtcctgtagttgcgtggactctgcacattgtcttgtacatgtgtagcctgtgcatgtatgtcttggaacactgtacaaggtacccctttctggctctcccatttccttgaggaccacagagagaggggagaagcctgggattgacagaagcttctgcccacctacttttctttcctcagatcatccagaagttcctcaagggccaggactttatctaataccttctgtgtgctcctccttggtgcctggcctggcacacatcaggagttcaataaatgtctgttgatgactgttgtacggaattc

SEQ ID NO: 1340 - DNA, 1661 bp; single-stranded, linear
  immediate source library: GENBANK
  immediate source clone: g34312
tgctgcagccgctgccgccgattccggatctcattgccacgcgcccccgacgaccgcccgacgtgcattcccgattccttttggttccaagtccaatatggcaactctaaaggatcagctgatttataatcttctaaaggaagaacagaccccccagaataagattacagttgttggggttggtgctgttggcatggcctgtgccatcagtatcttaatgaaggacttggcagatgaacttgctcttgttgatgtcatcgaagacaaattgaagggagagatgatggatctccaacatggcagccttttccttagaacaccaaagattgtctctggcaaagactataatgtaactgcaaactccaagctggtcattatcacggctggggcacgtcagcaagagggagaaagccgtcttaatttggtccagcgtaacgtgaacatatttaaattcatcattcctaatgttgtaaaatacagcccgaactgcaagttgcttattgtttcaaatccagtggatatcttgacctacgtggcttggaagataagtggttttcccaaaaaccgtgttattggaagtggttgcaatctggattcagcccgattccgttacctgatgggggaaaggctgggagttcacccattaagctgtcatgggtgggtccttggggaacatggagattccagtgtgcctgtatggagtggaatgaatgttgctggtgtctctctgaagactctgcacccagatttagggactgataaagataaggaacagtggaaagaggttcacaagcaggtggttgagagtgcttatgaggtgatcaaactcaaaggctacacatcctgggctattggactctctgtagcagatttggcagagagtataatgaagaatcttaggcgggtgcacccagtttccaccatgattaagggtctttacggaataaaggatgatgtcttccttagtgttccttgcattttgggacagaatggaatctcagaccttgtgaaggtgactctgacttctgaggaagaggcccgtttgaagaagagtgcagatacactttgggggatccaaaaggagctgcaattttaaagtcttctgatgtcatatcatttcactgtctaggctacaacaggattctaggtggaggttgtgcatgttgtcctttttatctgatctgtgattaaagcagtaatattttaagatggactgggaaaaacatcaactcctgaagttagaaataagaatggtttgtaaaatccacagctatatcctgatgctggatggtattaatcttgtgtagtcttcaactggttagtgtgaaatagttctgccacctctgacgcaccactgccaatgctgtacgtactgcatttgccccttgagccaggtggatgtttaccgtgtgttatataacttcctggctccttcactgaacatgcctagtccaacattttttcccagtgagtcacatcctgggatccagtgtataaatccaatatcatgtcttgtgcataattcttccaaaggatcttattttgtgaactatatcagtagtgtacattaccatataatgtaaaaagatctacatacaaacaatgcaaccaactatccaagtgttataccaactaaaacccccaataaaccttgaacagtg

SEQ ID NO: 1341 - DNA, 1040 bp; single-stranded, linear
  immediate source library: GENBANK
  immediate source clone: g34346
cgacgagccatggttgctgggagcgacgcggggcgggccctgggggtcctcagcgtggtctgcctgctgcactgctttggtttcatcagctgtttttcccaacaaatatatggtgttgtgtatgggaatgtaactttccatgtaccaagcaatgtgcctttaaaagaggtcctatggaaaaaacaaaaggataaagttgcagaactggaaaattctgaattcagagctttctcatcttttaaaaatagggtttatttagacactgtgtcaggtagcctcactatctacaacttaacatcatcagatgaagatgagtatgaaatggaatcgccaaatattactgataccatgaagttctttctttatgtgcttgagtctcttccatctcccacactaacttgtgcattgactaatggaagcattgaagtccaatgcatgataccagagcattacaacagccatcgaggacttataatgtactcatgggattgtcctatggagcaatgtaaacgtaactcaaccagtatatattttaagatggaaaatgatcttccacaaaaaatacagtgtactcttagcaatccattatttaatacaacatcatcaatcattttgacaacctgtatcccaagcagcggtcattcaagacacagatatgcacttatacccataccattagcagtaattacaacatgtattgtgctgtatatgaatggtattctgaaatgtgacagaaaaccagacagaaccaactccaattgattggtaacagaagatgaagacaacagcataactaaattattttaaaaactaaaaagccatctgatttctcatttgagtattacaatttttgaacaactgttggaaatgtaacttgaagcagctgctttaagaagaaatacccactaacaaagaacaagcattagttttggctgtcatcaacttattatatgactaggtgcttgctttttttgtcagtaaattgtttttactgatgatgtagatacttttgtaaataaatgtaaatatgtacacaagtg

SEQ ID NO: 1342 - DNA, 1399 bp; single-stranded, linear
  immediate source library: GENBANK
  immediate source clone: g34387
agtgtgaaatcttcagagaagaatttctctttagttctttgcaagaaggtagagataaagacactttttcaaaaatggcaatggtatcagaattcctcaagcaggcctggtttattgaaaatgaagagcaggaatatgttcaaactgtgaagtcatccaaaggtggtcccggatcagcggtgagcccctatcctaccttcaatccatcctcggatgtcgctgccttgcataaggccataatggttaaaggtgtggatgaagcaaccatcattgacattctaactaagcgaaacaatgcacagcgtcaacagatcaaagcagcatatctccaggaaacaggaaagcccctggatgaaacacttaagaaagcccttacaggtcaccttgaggaggttgttttagctctgctaaaaactccagcgcaatttgatgctgatgaacttcgtgctgccatgaagggccttggaactgatgaagatactctaattgagattttggcatcaagaactaacaaagaaatcagagacattaacagggtctacagagaggaactgaagagagatctggccaaagacataacctcagacacatctggagattttcggaacgctttgctttctcttgctaagggtgaccgatctgaggactttggtgtgaatgaagacttggctgattcagatgccagggccttgtatgaagcaggagaaaggagaaaggggacagacgtaaacgtgttcaataccatccttaccaccagaagctatccacaacttcgcagagtgtttcagaaatacaccaagtacagtaagcatgacatgaacaaagttctggacctggagttgaaaggtgacattgagaaatgcctcacagctatcgtgaagtgcgccacaagcaaaccagctttctttgcagagaagcttcatcaagccatgaaaggtgttggaactcgccataaggcattgatcaggattatggtttcccgttctgaaattgacatgaatgatatcaaagcattctatcagaagatgtatggtatctccctttgccaagccatcctggatgaaaccaaaggagattatgagaaaatcctggtggctctttgtggaggaaactaaacattcccttgatggtctcaagctatgatcagaagactttaattatatattttcatcctataagcttaaataggaaagtttcttcaacaggattacagtgtagctacctacatgctgaaaaatatagcctttaaatcatttttatattataactctgtataatagagataagtccattttttaaaaatgttttccccaaaccataaaaccctatacaagttgttctagtaacaatacatgagaaagatgtctatgtagctgaaaataaaatgacgtcacaagac

SEQ ID NO: 1343 - DNA, 1325 bp; single-stranded, linear
  immediate source library: GENBANK
  immediate source clone: g34444
gaggtttattgggcctcggtcctcctgcacctgctgcctggatccccggcctgcctgggcctgggccttggttctccccatgacaccacctgaacgtctcttcctcccaagggtgtgtggcaccaccctacacctcctccttctggggctgctgctggttctgctgcctggggcccaggggctccctggtgttggcctcacaccttcagctgcccagactgcccgtcagcaccccaagatgcatcttgcccacagcaccctcaaacctgctgctcacctcattggagaccccagcaagcagaactcactgctctggagagcaaacacggaccgtgccttcctccaggatggtttctccttgagcaacaattctctcctggtccccaccagtggcatctacttcgtctactcccaggtggtcttctctgggaaagcctactctcccaaggccacctcctccccactctacctggcccatgaggtccagctcttctcctcccagtaccccttccatgtgcctctcctcagctcccagaagatggtgtatccagggctgcaggaaccctggctgcactcgatgtaccacggggctgcgttccagctcacccagggagaccagctatccacccacacagatggcatcccccacctagtcctcagccctagtactgtcttctttggagccttcgctctgtagaacttggaaaaatccagaaagaaaaaataattgatttcaagaccttctccccattctgcctccattctgaccatttcaggggtcgtcaccacctctcctttggccattccaacagctcaagtcttccctgatcaagtcaccggagctttcaaagaaggaattctaggcatcccaggggacccacactccctgaaccatccctgatgtctgtctggctgaggatttcaagcctgcctaggaattcccagcccaaagctgttggtcttgtccaccagctaggtggggcctagatccacacacagaggaagagcaggcacatggaggagcttgggggatgactagaggcagggaggggactatttatgaaggcaaaaaaattaaattatttatttatggaggatggagagagggaataatagaagaacatccaaggagaaacagagacaggcccaagagatgaagagtgagagggcatgcgcacaaggctgaccaagagagaaagaagtaggcatgagggatcacagggccccagaaggcagggaaaggctctgaaagccagctgccgaccagagccccacacggaggcatctgcaccctcgatgaagcccaataaacctcttttctctga

SEQ ID NO: 1344 - DNA, 725 bp; single-stranded, linear
  immediate source library: GENBANK
  immediate source clone: g34513
ctaacccagaaacatccaattctcaaactgaagctcgcactctcgcctccagcatgaaagtctctgccgcccttctgtgcctgctgctcatagcagccaccttcattccccaagggctcgctcagccagatgcaatcaatgccccagtcacctgctgttataacttcaccaataggaagatctcagtgcagaggctcgcgagctatagaagaatcaccagcagcaagtgtcccaaagaagctgtgatcttcaagaccattgtggccaaggagatctgtgctgaccccaagcagaagtgggttcaggattccatggaccacctggacaagcaaacccaaactccgaagacttgaacactcactccacaacccaagaatctgcagctaacttattttcccctagctttccccagacaccctgttttattttattataatgaattttgtttgttgatgtgaaacattatgccttaagtaatgttaattcttatttaagttattgatgttttaagtttatctttcatggtactagtgttttttagatacagagacttggggaaattgcttttcctcttgaaccacagttctacccctgggatgttttgagggtctttgcaagaatcattaatacaaagaattttttttaacattccaatgcattgctaaaatattattgtggaaatgaatattttgtaactattacaccaaataaatatatttttgtac

SEQ ID NO: 1345 - DNA, 1041 bp; single-stranded, linear
  immediate source library: GENBANK
  immediate source clone: g34621
cccgcctgctgagccccatggcccgcgctgctctctccgccgcccccagcaatccccggctcctgcgagtggcactgctgctcctgctcctggtagccgctggccggcgcgcagcaggagcgtccgtggccactgaactgcgctgccagtgcttgcagaccctgcagggaattcaccccaagaacatccaaagtgtgaacgtgaagtcccccggaccccactgcgcccaaaccgaagtcatagccacactcaagaatgggcggaaagcttgcctcaatcctgcatcccccatagttaagaaaatcatcgaaaagatgctgaacagtgacaaatccaactgaccagaagggaggaggaagctcactggtggctgttcctgaaggaggccctgcccttataggaacagaagaggaaagagagacacagctgcagaggccacctggattgtgcctaatgtgtttgagcatcgcttaggagaagtcttctatttatttatttattcattagttttgaagattctatgttaatattttaggtgtaaaataattaagggtatgattaactctacctgcacactgtcctattatattcattctttttgaaatgtcaaccccaagttagttcaatctggattcatatttaatttgaaggtagaatgttttcaaatgttctccagtcattatgttaatatttctgaggagcctgcaacatgccagccactgtgatagaggctggcggatccaagcaaatggccaatgagatcattgtgaaggcaggggaatgtatgtgcacatctgttttgtaactgtttagatgaatgtcagttgttatttattgaaatgatttcacagtgtgtggtcaacatttctcatgttgaaactttaagaactaaaatgttctaaatatcccttggacattttatgtctttcttgtaaggcatactgccttgtttaatggtagttttacagtgtttctggcttagaacaaaggggcttaattattgatgttttcatagagaatataaaaataaagcacttatag

SEQ ID NO: 1346 - DNA, 1081 bp; single-stranded, linear
  immediate source library: GENBANK
  immediate source clone: g34658
ctctcctcctcgcacagccgctcgaaccgcctgctgagccccatggcccgcgccacgctctccgccgcccccagcaatccccggctcctgcgggtggcgctgctgctcctgctcctggtggccgccagccggcgcgcagcaggagcgcccctggccactgaactgcgctgccagtgcttgcagaccctgcagggaattcacctcaagaacatccaaagtgtgaaggtgaagtcccccggaccccactgcgcccaaaccgaagtcatagccacactcaagaatgggcagaaagcttgtctcaaccccgcatcgcccatggttaagaaaatcatcgaaaagatgctgaaaaatggcaaatccaactgaccagaaggaaggaggaagcttattggtggctgttcctgaaggaggccctgcccttacaggaacagaagaggaaagagagacacagctgcagaggccacctggattgcgcctaatgtgtttgagcatcacttaggagaagtcttctatttatttatttatttatttatttgtttgttttagaagattctatgttaatattttatgtgtaaaataaggttatgattgaatctacttgcacactctcccattatatttattgtttattttaggtcaaacccaagttagttcaatcctgattcatatttaatttgaagatagaaggtttgcagatattctctagtcatttgttaatatttcttcgtgatgacatatcacatgtcagccactgtgatagaggctgaggaatccaagaaaatggccagtgagatcaatgtgacggcagggaaatgtatgtgtgtctattttgtaactgtaaagatgaatgtcagttgttatttattgaaatgatttcacagtgtgtggtcaacatttctcatgttgaagctttaagaactaaaatgttctaaatatcccttggacattttatgtctttcttgtaaggcatactgccttgtttaatgttaattatgcagtgtttccctctgtgttagagcagagaggtttcgatatttattgatgttttcacaaagaacaggaaaataaaatatttaaaaat

SEQ ID NO: 1347 - DNA, 5158 bp; single-stranded, linear
  immediate source library: GENBANK
  immediate source clone: g34702
ttggggggcctcgttgttttgcgtcttagttccgccctcctgtccatcaggagaaggaaaggataaaccctgggccatgaggctacccctgctcctggtttttgcctctgtcattccgggtgctgttctcctactggacaccaggcaatttttaatctataatgaagatcacaagcgctgcgtggatgcagtgagtcccagtgccgtccaaaccgcagcttgcaaccaggatgccgaatcacagaaattccgatgggtgtccgaatctcagattatgagtgttgcatttaaattatgcctgggagtgccatcaaaaacagactgggttgctatcactctctatgcctgtgactcaaaaagtgaatttcagaaatgggagtgcaaaaatgacacacttttggggatcaaaggagaagatttattttttaactacggcaacagacaagaaaagaatattatgctctacaagggatcgggtttatggagcaggtggaagatctatggaaccacagacaatctgtgctccagaggttatgaagccatgtatacgctactaggcaatgccaatggagcaacctgtgcattcccgttcaagtttgaaaacaagtggtacgcagattgcacgagtgctgggcggtcggatggatggctctggtgcggaaccactactgactatgacacagacaagctatttggatattgtccattgaaatttgagggcagtgaaagcttatggaataaagacccgctgaccagcgtttcctaccagataaactccaaatccgctttaacgtggcaccaagcgaggaaaagctgccaacaacagaacgctgagctcctgagcatcacagagatacatgagcaaacatacctgacaggattaaccagttccttgacctcaggactctggattggacttaacagtctgagcttcaacagcggttggcagtggagtgaccgcagtcctttccgatatttgaactggttaccaggaagtccatcagctgaacctggaaaaagctgtgtgtcactaaatcctggaaaaaatgctaaatgggaaaatctggaatgtgttcagaaactgggctatatttgcaaaaagggcaacaccactttaaattcttttgttattccctcagaaagtgatgtgcctactcactgtcctagtcagtggtggccgtatgccggtcactgttacaagattcacagagatgagaaaaaaatccagagggatgctctgaccacctgcaggaaggaaggcggtgacctcacaagtatccacaccatcgaggaattggactttattatctcccagctaggatatgagccaaatgacgaattgtggatcggcttaaatgacattaagattcaaatgtactttgagtggagtgatgggacccctgtaacgtttaccaaatggcttcgtggagaaccaagccatgaaaacaacagacaggaggattgtgtggtgatgaaaggcaaggatgggtactgggcagatcggggctgtgagtggcctcttggctacatctgcaagatgaaatcacgaagccaaggtccagaaatagtggaagtcgaaaaaggctgcaggaaaggctggaaaaaacatcacttttactgctatatgattggacatacgctttcaacatttgcagaagcaaaccaaacctgtaataatgagaatgcttatttaacaactattgaagacagatatgaacaagccttcctgactagtttcgttggcttaaggcctgaaaaatatttctggacaggactttcagatatacaaaccaaagggacttttcagtggaccatcgaggaagaggttcggttcacccactggaattcagatatgccagggcgaaagccagggtgtgttgccatgagaaccgggattgcagggggcttatgggatgttttgaaatgtgatgaaaaggcaaaatttgtgtgcaagcactgggcagaaggagtaacccacccaccgaagcccacgacgactcccgaacccaaatgtccggaggattggggcgccagcagtagaacaagcttgtgtttcaagctgtatgcaaaaggaaaacatgagaagaaaacgtggtttgaatctcgagatttttgtcgagctctgggtggagacttagctagcatcaataacaaagaggaacagcaaacaatatggcgattaataacagctagtggaagctaccacaaactgttttggttgggattgacatatggaagcccttcagaaggttttacttggagtgatggttctcctgtttcatatgaaaactgggcttatggagaacctaataattatcaaaatgttgaatactgtggtgagctgaaaggtgaccctactatgtcttggaatgatattaattgtgaacaccttaacaactggatttgccagatacaaaaaggacaaacaccaaaacctgagccaacaccagctcctcaagacaatccaccagttactgaagatgggtgggttatttacaaagactaccagtattatttcagcaaagagaaggaaaccatggacaatgcgcgagcgttttgcaagaggaattttggtgatcttgtttctattcaaagtgaaagtgaaaagaagtttctatggaaatatgtaaacagaaatgatgcacagtctgcatattttattggtttattgatcagcttggataaaaagtttgcttggatggatggaagcaaagtggattacgtgtcttgggccacaggtgaacccaattttgcaaatgaagatgaaaactgtgtgaccatgtattcaaattcagggttttggaatgacattaactgtggctatccaaacgccttcatttgccagcgacataacagtagtatcaatgctaccacagttatgcctaccatgccctcggtcccatcagggtgcaaggaaggttggaatttctacagcaacaagtgtttcaaaatctttggatttatggaagaagaaagaaaaaattggcaagaggcacgaaaagcttgtataggctttggagggaatctggtctccatacaaaatgaaaaagagcaagcatttcttacctatcacatgaaggactccactttcagtgcctggactgggctgaatgatgtcaattcagaacacacgttcctttggacggatggacgaggagtccattacacaaactgggggaaaggttaccctggtggaagaagaagcagtctttcttatgaagatgctgactgtgttgttattattggaggtgcatcaaatgaagcaggaaaatggatggatgatacctgcgacagtaaacgaggctacatatgccagacacgatccgacccttccttgactaatcctccagcaacgattcaaacagatggctttgttaaatatggcaaaagcagctattcactcatgagacaaaaatttcaatggcatgaagcggagacatactgcaagcttcacaattcccttatagccagcattctggatccctacagtaatgcatttgcgtggctgcagatggaaacatctaatgaacgtgtgtggatcgccctgaacagtaacttgactgataatcaatacacttggactgataagtggagggtgaggtacactaactgggctgctgatgagcccaaattgaaatcagcatgtgtttatctggatcttgatggctactggaagacagcacattgcaatgaaagtttttactttctctgtaaaagatcagatgaaatccctgctactgaacccccacaactgcctggcagatgcccggagtcagatcacacagcatggattcctttccatggtcactgttactatattgagtcctcatatacaagaaactggggccaagcttctctggaatgtcttcgaatgggttcctctctggtttccattgaaagtgctgcagaatccagttttctgtcatatcgggttgagccacttaaaagtaaaaccaatttttggataggattgttcagaaatgttgaagggacgtggctgtggataaataacagtccggtctcctttgtcaactggaacacaggagatccctctggtgaacggaatgattgtgtgactttacatgcgtcttctgggttttggagtaatattcactgttcttcctacaaaggatatatttgtaaaagaccaaaaattattgatgctaaacctactcatgaattacttacaacaaaagctgacacaaggaagatggacccttctaaaccgtcttccaacgtggccggagtagtcatcattgtgatcctcctgattttaacgggtgctggccttgccgcctatttcttttataagaaaagacgtgtgcacctacctcaagagggcgcctttgaaaacactctgtattttaacagtcagtcaagcccaggaactagtgatatgaaagatctcgtgggcaatattgaacagaatgaacactcggtcatctagtacctcaatgcgattctgagatatttgaatttcataaaattgtaactgaaatttaaaatttttagttcaatgtgattgttttctttaaaatgagtactgaattgtactggtctgtccttttttcctttgcctaattgaagaaataattgcttgttttctagcctggcaagatattttcataaaagagggataacaatgctgattactaccttttaaaatattttagataaatgcacagcaccacagcaccacatctaagcattagtgatgggtagctgatgtcagcttcatgtggattttaagcactctagaaacaatgaagcttcttggcatattttaaggagctcccaaaatgtgttacctattaaattgtaactcagcaagtagaagaccatttgaaaagtcaggtacaaatttcctcaagtggcataaaaatgtagtcagttttctcttttaccagtttttatttccactccaattatttagaactttatttgtacatgtgcagaagaataaggcagctgagaatcttgtttcccccaagagagttttacaggctgagtgttgcaaatgtgttctttgtcctgttatatgtatatcaggaatacaaggatgtgaaataaaactgtaaatttgcataactggatgtacttagataatgtgaaataaacattaaagacaaggtctatttttaataaaaaaaaaaaaaaa

SEQ ID NO: 1348 - DNA, 829 bp; single-stranded, linear
  immediate source library: GENBANK
  immediate source clone: g34710
gctgtggtggcttcggcagcggcttcagcagatcggcggcatcagcggtaagccagcactagcagcatgttgagccgggcagtgtgcggcaccagcaggcagctggctccggctttggggtatctgggctccaggcagaagcacagcctccccgacctgccctacgactacggcgccctggaacctcacatcaacgcgcagatcatgcagctgcaccacagcaagcaccacgcggcctacgtgaacaacctgaacgtcaccgaggagaagtaccaggaggcgttggccaagggagatgttacagcccagatagctcttcagcctgcactgaagttcaatggtggtggtcatatcaatcatagcattttctggacaaacctcagccctaacggtggtggagaacccaaaggggagttgctggaagccatcaaacgtgactttggttcctttgacaagtttaaggagaagctgacggctgcatctgttggtgtccaaggctcaggttggggttggcttggtttcaataagcaacggggacacttacaaattgctgcttgtccaaatcaggatccactgcaaggaacaacaggccttattccactgctggggattgatgtgtgggagcacgcttactaccttcagtataaaaatgtcaggcctgattatctaaaagctatttggaatgtaatcaactgggagaatgtaactgaaagatacatggcttgcaaaaagtaaaccacgatcgttatgctgatcataccctaatgatcccagcaagataatgtcctgtcttctaagatgtgcatcaagcctgggtacatactgaaac

SEQ ID NO: 1349 - DNA, 960 bp; single-stranded, linear
  immediate source library: GENBANK
  immediate source clone: g34750
cgcaaagagtagtcagtcccttcttggctctgctgacactcgagcccacattccatcacctgctcccaatcatgcaggtctccactgctgcccttgccgtcctcctctgcaccatggctctctgcaaccaggtcctctctgcaccacgtgagtccatgttgttgttgtgggtatcaccactctctggccatggttagaccacatcagtctttttttgcggcctgagagccccgaagagaaaagaaggaagttcttaaagcgctgccaaacaccttggtctttttcttcacaacttttatttttatctctagaaggggtcttagccctcctagtctccagttgctgctgacacgccgaccgcctgctgcttcagctacacctcccgacagattccacagaatttcatagctgactactttgagacgagcagccagtgctccaagcccagtgtcatcttcctaaccaagagaggccggcaggtctgtgctgaccccagtgaggagtgggtccagaaatacgtcagtgacctggagctgagtgcctgaggggtccagaagcttcgaggcccagcgacctcagtgggcccagtggggaggagcaggagcctgagccttgggaacatgcgtgtgacctctacagctacctcttctatggactggttattgccaaacagccacactgtgggactcttcttaacttaaattttaatttatttatactatttagtttttataatttatttttgatttcacagtgtgtttgtgattgtttgctctgagagttccccctgtcccctccaccttccctcacagtgtgtctggtgacaaccgagtggctgtcatcggcctgtgtaggcagtgatggcaccaaagccaccagactgacaaatgtgtgatcagatgcttttgttcagggctgtgatcggcctggggaaataataaagatgttcttttaaacggt

SEQ ID NO: 1350 - DNA, 462 bp; single-stranded, linear
  immediate source library: GENBANK
  immediate source clone: g34770
aaaacactctgtgtggctcctcggctttgacagagtgcaagacgatgacttgcaaaatgtcgcagctggaacgcaacatagagaccatcatcaacaccttccaccaatactctgtgaagctggggcacccagacaccctgaaccagggggaattcaaagagctggtgcgaaaagatctgcaaaattttctcaagaaggagaataagaatgaaaaggtcatagaacacatcatggaggacctggacacaaatgcagacaagcagctgagcttcgaggagttcatcatgctgatggcgaggctaacctgggcctcccacgagaagatgcacgagggtgacgagggccctggccaccaccataagccaggcctcggggagggcaccccctaagaccacagtggccaagatcacagtggccacggccacggccacagtcatggtggccacggccacagccacccat

SEQ ID NO: 1351 - DNA, 2121 bp; single-stranded, linear
  immediate source library: GENBANK
  immediate source clone: g34815
ctgctcgcggccgccaccgccgggccccggccgtccctggctcccctcctgcctcgagaagggcagggcttctcagaggcttggcgggaaaaaagaacggagggagggatcgcgctgagtataaaagccggttttcggggctttatctaactcgctgtagtaattccagcgagaggcagagggagcgagcgggcggccggctagggtggaagagccgggcgagcagagctgcgctgcgggcgtcctgggaagggagatccggagcgaatagggggcttcgcctctggcccagccctcccgcttgatcccccaggccagcggtccgcaacccttgccgcatccacgaaactttgcccatagcagcgggcgggcactttgcactggaacttacaacacccgagcaaggacgcgactctcccgacgcggggaggctattctgcccatttggggacacttccccgccgctgccaggacccgcttctctgaaaggctctccttgcagctgcttagacgctggatttttttcgggtagtggaaaaccagcagcctcccgcgacgatgcccctcaacgttagcttcaccaacaggaactatgacctcgactacgactcggtgcagccgtatttctactgcgacgaggaggagaacttctaccagcagcagcagcagagcgagctgcagcccccggcgcccagcgaggatatctggaagaaattcgagctgctgcccaccccgcccctgtcccctagccgccgctccgggctctgctcgccctcctacgttgcggtcacacccttctcccttcggggagacaacgacggcggtggcgggagcttctccacggccgaccagctggagatggtgaccgagctgctgggaggagacatggtgaaccagagtttcatctgcgacccggacgacgagaccttcatcaaaaacatcatcatccaggactgtatgtggagcggcttctcggccgccgccaagctcgtctcagagaagctggcctcctaccaggctgcgcgcaaagacagcggcagcccgaaccccgcccgcggccacagcgtctgctccacctccagcttgtacctgcaggatctgagcgccgccgcctcagagtgcatcgacccctcggtggtcttcccctaccctctcaacgacagcagctcgcccaagtcctgcgcctcgcaagactccagcgccttctctccgtcctcggattctctgctctcctcgacggagtcctccccgcagggcagccccgagcccctggtgctccatgaggagacaccgcccaccaccagcagcgactctgaggaggaacaagaagatgaggaagaaatcgatgttgtttctgtggaaaagaggcaggctcctggcaaaaggtcagagtctggatcaccttctgctggaggccacagcaaacctcctcacagcccactggtcctcaagaggtgccacgtctccacacatcagcacaactacgcagcgcctccctccactcggaaggactatcctgctgccaagagggtcaagttggacagtgtcagagtcctgagacagatcagcaacaaccgaaaatgcaccagccccaggtcctcggacaccgaggagaatgtcaagaggcgaacacacaacgtcttggagcgccagaggaggaacgagctaaaacggagcttttttgccctgcgtgaccagatcccggagttggaaaacaatgaaaaggcccccaaggtagttatccttaaaaaagccacagcatacatcctgtccgtccaagcagaggagcaaaagctcatttctgaagaggacttgttgcggaaacgacgagaacagttgaaacacaaacttgaacagctacggaactcttgtgcgtaaggaaaagtaaggaaaacgattccttctaacagaaatgtcctgagcaatcacctatgaacttgtttcaaatgcatgatcaaatgcaacctcacaaccttggctgagtcttgagactgaaagatttagccataatgtaaactgcctcaaattggactttgggcataaaagaacttttttatgcttaccatcttttttttttctttaacagatttgtatttaagaattgtttttaaaaaattttaa

SEQ ID NO: 1352 - DNA, 2286 bp; single-stranded, linear
  immediate source library: GENBANK
  immediate source clone: g348706
cctgtgagcaccacgtcaacggctcccggcccccatgcacgggggagggagatacccccaagtgtagcaagatctgtgagcctggctacagcccgacctacaaacaggacaagcactacggatacaattcctacagcgtctccaatagcgagaaggacatcatggccgagatctacaaaaacggccccgtggagggagctttctctgtgtattcggacttcctgctctacaagtcaggagtgtaccaacacgtcaccggagagatgatgggtggccatgccatccgcatcctgggctggggagtggagaatggcacaccctactggctggttgccaactcctggaacactgactggggtgacaatggcttctttaaaatactcagaggacaggatcactgtggaatcgaatcagaagtggtggctggaattccacgcaccgatcagtactgggaaaagatctaatctgccgtgggcctgtcgtgccagtcctgggggcgagatcggggtagaaatgcattttattctttaagttcacgtaagatacaagtttcagacagggtctgaaggactggattggccaaacatcagacctgtcttccaaggagaccaagtcctggctacatcccagcctgtggttacagtgcagacaggccatgtgagccaccgctgccagcacagagcgtccttccccctgtagactagtgccgtaggagtacctgctgccccagctgactgtggccccctccgtgatccatccatctccagggagcaagacagagacgcaggaatggaaagcggagttcctaacaggatgaaagttcccccatcagttcccccagtacctccaagcaagtagctttccacatttgtcacagaaatcagaggagagacggtgttggagccctttggagaacgccagtctcccaggccccctgcatctatcgagtttgcaatgtcacaacctctctgatcttgtgctcagcatgattctttaatagaagttttattttttcgtgcactctgctaatcatgtgggtgagccagtggaacagcgggagacctgtgctagttttacagattgcctccttatgacgcggctcaaaaggaaaccaagtggtcaggagttgtttctgacccactgatctctactaccacaaggaaaatagtttaggagaaaccagcttttactgtttttgaaaaattacagcttcaccctgtcaagttaacaaggaatgcctgtgccaataaaaggtttcggaattccgtcccctttcaagttttagggaaatttaactgaagtgtatacaaattagacattgctaatatgtacaaaagtattttatacggtttttgaacgatctagctatttgcaataaacaggatgttacaaaaacagtccaataatgcatttcctattaagaagcacaatacacaacataattcaattttattaaaaaataacttcaaaatgtagaacaatcccctttaggaagaaaagctatttctgtagttcactctgtcagtaaacacacaagttgaacgctgcagcagagggctgtccttttccatggagaaaagaaatgaggcttctagggcctatcttttctgggtaaaaattccacctacagctgagatgggcagttattgcctgtggtaggcagaatttgaaaatgccccttccccctttcaatgagctaatctccagaacccgtgaatatgatgagatgagacagtactcctgcaattatgttctatcgcacaatcaaccttaaaatatatctgtgggcttgagctaatcatatgcccctaaaacaggaggacgggagagagatatgaagcatgagaaagagcaggaaggctggtttgaagctggaggggaccacataagaaggaatgcaggcagccttgaggtgagagaggggcctccagctgagagccagcaaagaactgaattccgccaacaacctgaatgaacttagaagcagattcttccccagagcctccatgaaggaatgttgtcctgccaacccttatttcagcctttaagaccctgagcagagaatccagccacactgtgccagactcatgagctacagaactgctatgggtattgttttttaaactgctaaatttggggtaatttgtcacacagcaatagaaaactaatacactgcccaagggtaacttttcttaacctaattacatttggcagtttctgcttgggttctgaatgcatttttttacacaaagctctgctggaaaaactgaataacgcgctggcagc

SEQ ID NO: 1353 - DNA, 1741 bp; single-stranded, linear
  immediate source library: GENBANK
  immediate source clone: g348911
ctaggtagctggcaccaggagccgtgggcaagggaagaggccacaccctgccctgctctgctgcagccagaatgggtgtgaaggcgtctcaaacaggctttgtggtcctggtgctgctccagtgctgctctgcatacaaactggtctgctactacaccagctggtcccagtaccgggaaggcgatgggagctgcttcccagatgcccttgaccgcttcctctgtacccacatcatctacagctttgccaatataagcaacgatcacatcgacacctgggagtggaatgatgtgacgctctacggcatgctcaacacactcaagaacaggaaccccaacctgaagactctcttgtctgtcggaggatggaactttgggtctcaaagattttccaagatagcctccaacacccagagtcgccggactttcatcaagtcagtaccgccattcctgcgcacccatggctttgatgggctggaccttgcctggctctaccctggacggagagacaaacagcattttaccaccctaatcaaggaaatgaaggccgaatttataaaggaagcccagccagggaaaaagcagctcctgctcagcgcagcactgtctgcggggaaggtcaccattgacagcagctatgacattgccaagatatcccaacacctggatttcattagcatcatgacctacgattttcatggagcctggcgtgggaccacaggccatcacagtcccctgttccgaggtcaggaggatgcaagtcctgacagattcagcaacactgactatgctgtggggtacatgttgaggctgggggctcctgccagtaagctggtgatgggcatccccaccttcgggaggagcttcactctggcttcttctgagactggtgttggagccccaatctcaggaccgggaattccaggccggttcaccaaggaggcagggacccttgcctactatgagatctgtgacttcctccgcggagccacagtccatagaaccctcggccagcaggtcccctatgccaccaagggcaaccagtgggtaggatacgacgaccaggaaagcgtcaaaagcaaggtgcagtacctgaaggataggcagctggcaggcgccatggtatgggccctggacctggatgacttccagggctccttctgcggccaggatctgcgcttccctctcaccaatgccatcaaggatgcactcgctgcaacgtagccctctgttctgcacacagcacgggggccaaggatgccccgtccccctctggctccagctggccgggagcctgatcacctgccctgctgagtcccaggctgagcctcagtctccctcccttggggcctatgcagaggtccacaacacacagatttgagctcagccctggtgggcagagaggtagggatggggctgtggggatagtgaggcatcgcaatgtaagactcgggattagtacacacttgttgatgattaatggaaatgtttacagatccccaagcctggcaagggaatttcttcaactccctgccccctagccctccttatcaaaggacaccattttggcaagctctatcaccaaggagccaaacatcctacaagacacagtgaccatactaattataccccctgcaaagccagcttgaaaccttcacttaggaacgtaatcgtgtcccctatcctacttccccttcctaattccacagctgctcaataaagtacaagagtttaacagtgtg

SEQ ID NO: 1354 - DNA, 1906 bp; single-stranded, linear
  immediate source library: GENBANK
  immediate source clone: g349277
ccaagtcacatgattcaggattcagggggagaatccttcttggaacagagatgggcccagaactgaatcagatgaagagagataaggtgtgatgtggggaagactatataaagaatggacccagggctgcagcaagcactcaacggaatggcccctcctggagacacagccatgcatgtgccggcgggctccgtggccagccacctggggaccacgagccgcagctatttctatttgaccacagccactctggctctgtgccttgtcttcacggtggccactattatggtgttggtcgttcagaggacggactccattcccaactcacctgacaacgtccccctcaaaggaggaaattgctcagaagacctcttatgtatcctgaaaagagctccattcaagaagtcatgggcctacctccaagtggcaaagcatctaaacaaaaccaagttgtcttggaacaaagatggcattctccatggagtcagatatcaggatgggaatctggtgatccaattccctggtttgtacttcatcatttgccaactgcagtttcttgtacaatgcccaaataattctgtcgatctgaagttggagcttctcatcaacaagcatatcaaaaaacaggccctggtgacagtgtgtgagtctggaatgcaaacgaaacacgtataccagaatctctctcaattcttgctggattacctgcaggtcaacaccaccatatcagtcaatgtggatacattccagtacatagatacaagcacctttcctcttgagaatgtgttgtccatcttcttatacagtaattcagactgaacagtttctcttggccttcaggaagaaagcgcctctctaccatacagtatttcatccctccaaacacttgggcaaaaagaaaactttagaccaagacaaactacacagggtattaaatagtatacttctccttctgtctcttggaaagatacagctccagggttaaaaagagagtttttagtgaagtatctttcagatagcaggcagggaagcaatgtagtgtggtgggcagagccccacacagaatcagaagggatgaatggatgtcccagcccaaccactaattcactgtatggtcttgatctatttcttctgttttgagagcctccagttaaaatggggcttcagtaccagagcagctagcaactctgccctaatgggaaatgaaggggagctgggtgtgagtgtttacactgtgcccttcacgggatacttcttttatctgcagatggcctaatgcttagttgtccaagtcgcgatcaaggactctctcacacaggaaacttccctatactggcagatacacttgtgactgaaccatgcccagtttatgcctgtctgactgtcactctggcactaggaggctgatcttgtactccatatgaccccacccctaggaacccccagggaaaaccaggctcggacagccccctgttcctgagatggaaagcacaaatttaatacaccaccacaatggaaaacaagttcaaagacttttacttacagatcctggacagaaagggcataatgagtctgaagggcagtcctccttctccaggttacatgaggcaggaataagaagtcagacagagacagcaagacagttaacaacgtaggtaaagaaatagggtgtggtcactctcaattcactggcaaatgcctgaatggtctgtctgaaggaagcaacagagaagtggggaatccagtctgctaggcaggaaagatgcctctaagttcttgtctctggccagaggtgtggtatagaaccagaaacccatatcaagggtgactaagcccggcttccggtatgagaaattaaacttgtatacaaaatggttgccaaggcaacataaaattataagaattc

SEQ ID NO: 1355 - DNA, 3787 bp; single-stranded, linear
  immediate source library: GENBANK
  immediate source clone: g349765
tcgctacatgatgactttagaagagaccgttccctccgccttcttcctcagaggaagtttcttggtagatcaccgacacctcatccaggcggggggttggggggaaacttggcaccagccatcccaggcagagcaccactgtgatttgttctcctggtggagagagctggaaggaaggagccagcgtgcaaataatgaaggagcacgggggcaccttcagtagcaccggaatcagcggtggtagcggtgactctgctatggacagcctgcagccgctccagcctaactacatgcctgtgtgtttgtttgcagaagaatcttatcaaaaattagcaatggaaacgctggaggaattagactggtgtttagaccagctagagaccatacagacctaccggtctgtcagtgagatggcttctaacaagttcaaaagaatgctgaaccgggagctgacacacctctcagagatgagccgatcagggaaccaggtgtctgaatacatttcaaatactttcttagacaagcagaatgatgtggagatcccatctcctacccagaaagacagggagaaaaagaaaaagcagcagctcatgacccagataagtggagtgaagaaattaatgcatagttcaagcctaaacaatacaagcatctcacgctttggagtcaacactgaaaatgaagatcacctggccaaggagctggaagacctgaacaaatggggtcttaacatctttaatgtggctggatattctcacaatagacccctaacatgcatcatgtatgctatattccaggaaagagacctcctaaagacattcagaatctcatctgacacatttataacctacatgatgactttagaagaccattaccattctgacgtggcatatcacaacagcctgcacgctgctgatgtagcccagtcgacccatgttctcctttctacaccagcattagacgctgtcttcacagatttggagatcctggctgccatttttgcagctgccatccatgacgttgatcatcctggagtctccaatcagtttctcatcaacacaaattcagaacttgctttgatgtataatgatgaatctgtgttggaaaatcatcaccttgctgtgggtttcaaactgctgcaagaagaacactgtgacatcttcatgaatctcaccaagaagcagcgtcagacactcaggaagatggttattgacatggtgttagcaactgatatgtctaaacatatgagcctgctggcagacctgaagacaatggtagaaacgaagaaagttacaagttcaggcgttcttctcctagacaactataccgatcgcattcaggtccttcgcaacatggtacactgtgcagacctgagcaaccccaccaagtccttggaattgtatcggcaatggacagaccgcatcatggaggaatttttccagcagggagacaaagagcgggagaggggaatggaaattagcccaatgtgtgataaacacacagcttctgtggaaaaatcccaggttggtttcatcgactacattgtccatccattgtgggagacatgggcagatttggtacagcctgatgctcaggacattctcgataccttagaagataacaggaactggtatcagagcatgatacctcaaagtccctcaccaccactggacgagcagaacagggactgccagggtctgatggagaagtttcagtttgaactgactctcgatgaggaagattctgaaggacctgagaaggagggagagggacacagctatttcagcagcacaaagacgctttgtgtgattgatccagaaaacagagattccctgggagagactgacatagacattgcaacagaagacaagtcccccgtggatacataatccccctctccctgtggagatgaacattctatccttgatgagcatgccagctatgtggtagggccagcccaccatgggggccaagacctgcacaggacaagggccacctggcctttcagttacttgagtttggagtcagaaagcaagaccaggaagcaaatagcagctcaggaaatcccacggttgacttgccttgatggcaagcttggtggagagggctgaagctgttgctgggggccgattctgatcaagacacatggcttgaaaatggaagacacaaaactgagagatcattctgcactaagtttcgggaacttatccccgacagtgactgaactcactgactaataacttcatttatgaatcttctcacttgtccctttgtctgccaacctgtgtgccttttttgtaaaacattttcatgtctttaaaatgcctgttgaatacctggagtttagtatcaacttctacacagataagctttcaaagttgacaaacttttttgactctttctggaaaagggaaagaaaatagtcttccttctttcttgggcaatatccttcactttactacagttacttttgcaaacagacagaaaggatacacttctaaccacattttacttccttcccctgttgtccagtccaactccacagtcactcttaaaacttctctctgtttgcctgcctccaacagtacttttaactttttgctgtaaacagaataaaattgaacaaattagggggtagaaaggagcagtggtgtcgttcaccgtgagagtctgcatagaactcagcagtgtgccctgctgtgtcttggaccctgccccccacaggagttgtacagtccctggccctgttccctacctcctctcttcaccccgttaggctgttttcaatgtaatgctgccgtccttctcttgcactgccttctgcgctaacacctccattcctgtttataaccgggtatttattacttaatgtatataatgtaatgttttgtaagttattaatttatatatctaacattgcctgccaatggtggtgttaaatttgtgtagaaaactctgcctaagagttacgactttttcttgtaatgttttgtattgtgtattatataacccaaacgtcacttagtagagacatatggcccccttggcagagaggacaggggtgggcttttgttcaaagggtctgccctttccctgcctgagttgctacttctgcacaacccctttatgaaccagttttggaaacaatattctcacattagatactaaatggtttatactgagcttttacttttgtatagcttgataggggcagggggcaatgggatgtagtttttacccaggttctatccaaatctatgtgggcatgagttgggttataactggatcctactatcattgtggctttggttcaaaaggaaacactacatttgctcacagatgattcttctgaatgctcccgaactactgactttgaagaggtagcctcctgcctgccattaagcaggaatgtcatgttccagttcattacaaaagaaaacaataaaacaatgtgaatttttataataaaatgtgaactgatgtagcaaattacgcaaatgtgaagcctcttctgataacacttgttaggcctcttactgatgtcagtttcagtttgtaaaatatgtttcatgctttcagttcagcattgtgactcagtaattacagaaaatggcacaaatgtgcatgaccaatgtatgtctatgaacactgcattgtttcaggtggacattttatcattttcaaatgtttctcacaatgtatgttatagtattattattatatattgtgttcaaatgcattctaaagagacttttatatgaggtgaataaagaaaagcatgattaga

SEQ ID NO: 1356 - DNA, 1414 bp; single-stranded, linear
  immediate source library: GENBANK
  immediate source clone: g35014
ggaattccggaattccgcggagcaggcctcgtgccgttacggccatcacggccgccgcagtggcgtcctggagccctcctcagtgctgaagctgctgaaagatggcagaagaagtggtggtagtagccaaatttgattatgtggcccaacaagaacaagagttggacatcaagaagaatgagagattatggcttctggatgattctaagtcctggtggcgagttcgaaattccatgaataaaacaggttttgtgccttctaactatgtggaaaggaaaaacagtgctcggaaagcatctattgtgaaaaacctaaaggataccttaggcattggaaaagtgaaaagaaaacctagtgtgccagattctgcatctcctgctgatgatagttttgttgacccaggggaacgtctctatgacctcaacatgcccgcttatgtgaaatttaactacatggctgagagagaggatgaattatcattgataaaggggacaaaggtgatcgtcatggagaaatgcagtgatgggtggtggcgtggtagctacaatggacaagttggatggttcccttcaaactatgtaactgaagaaggtgacagtcctttgggtgaccatgtgggttctctgtcagagaaattagcagcagtcgtcaataacctaaatactgggcaagtgttgcatgtggtacaggctctttacccattcagctcatctaatgatgaagaacttaatttcgagaaaggagatgtaatggatgttattgaaaaacctgaaaatgacccagagtggtggaaatgcaggaagatcaatggtatggttggtctagtaccaaaaaactatgttaccgttatgcagaataatccattaacttcaggtttggaaccatcacctccacagtgtgattacattaggccttcactcactggaaagtttgctggcaatccttggtattatggcaaagtcaccaggcatcaagcagaaatggcattaaatgaaagaggacatgaaggggatttcctcattcgtgatagtgaatcttcgccaaatgatttctcagtatcactaaaagcacaagggaaaaacaagcattttaaagtccaactaaaagagactgtctactgcattgggcagcgtaaattcagcaccatggaagaacttgtagaacattacaaaaaggcaccaatttttacaagtgaacaaggagaaaaattatatcttgtcaagcatttatcatgatactgctgaccagaagtgactgctgtgtagctgtaatttgtcatgtaattgaattgaagactgagaaaatgttgggtccagtcgtgcttgattggaaattgttgtttctaaatctatatgagatttgacatagtattttattatactcagccatacatatatactatgtatgagcagtg

SEQ ID NO: 1357 - DNA, 732 bp; single-stranded, linear
  immediate source library: GENBANK
  immediate source clone: g35067
tgctgcgaaccacgtgggtcccgggcgcgtttcgggtgctggcggctgcagccggagttcaaacctaagcagctggaaggaaccatggccaactgtgagcgtaccttcattgcgatcaaaccagatggggtccagcggggtcttgtgggagagattatcaagcgttttgagcagaaaggattccgccttgttggtctgaaattcatgcaagcttccgaagatcttctcaaggaacactacgttgacctgaaggaccgtccattctttgccggcctggtgaaatacatgcactcagggccggtagttgccatggtctgggaggggctgaatgtggtgaagacgggccgagtcatgctcggggagaccaaccctgcagactccaagcctgggaccatccgtggagacttctgcatacaagttggcaggaacattatacatggcagtgattctgtggagagtgcagagaaggagatcggcttgtggtttcaccctgaggaactggtagattacacgagctgtgctcagaactggatctatgaatgacaggagggcagaccacattgcttttcacatccatttcccctccttcccatgggcagaggaccaggctgtaggaaatctagttatttacaggaacttcatcataatttggagggaagctcttggagctgtgagttctccctgtacagtgttaccatccccgaccatctgattaaaatgcttcctcccagc

SEQ ID NO: 1358 - DNA, 4704 bp; single-stranded, linear
  immediate source library: GENBANK
  immediate source clone: g35175
gaattcctgccactcttcctgcaacggcccaggagctcagagctccacatctgaccttctagtcatgaccaggaccagggcagcactcctcctgttcacagccttagcaacttctctaggtttcaacttggacacagaggagctgacagccttccgtgtggacagcgctgggtttggagacagcgtggtccagtatgccaactcctgggtggtggttggagccccccaaaagataacagctgccaaccaaacgggtggcctctaccagtgtggctacagcactggtgcctgtgagcccatcggcctgcaggtgcccccggaggccgtgaacatgtccctgggcctgtccctggcgtctaccaccagcccttcccagctgctggcctgcggccccaccgtgcaccacgagtgcgggaggaacatgtacctcaccggactctgcttcctcctgggccccacccagctcacccagaggctcccggtgtccaggcaggagtgcccaagacaggagcaggacattgtgttcctgatcgatggctcaggcagcatctcctcccgcaactttgccacgatgatgaacttcgtgagagctgtgataagccagttccagagacccagcacccagttttccctgatgcagttctccaacaaattccaaacacacttcactttcgaggaattcaggcgcacgtcaaaccccctcagcctgttggcttctgttcaccagctgcaagggtttacatacacggccaccgccatccaaaatgtcgtgcaccgattgttccatgcctcatatggggcccgtagggatgccaccaaaattctcattgtcatcactgatgggaagaaagaaggcgacagcctggattataaggatgtcatccccatggctgatgcagcaggcatcatccgctatgcaattggggttggattagcttttcaaaacagaaattcttggaaagaattaaatgacattgcatcgaagccctcccaggaacacatatttaaagtggaggactttgatgctctgaaagatattcaaaaccaactgaaggagaagatctttgccattgagggtacggagaccacaagcagtagctccttcgaattggagatggcacaggagggcttcagcgctgtgttcacacctgatggccccgttctgggggctgtggggagcttcacctggtctggaggtgccttcctgtaccccccaaatatgagccctaccttcatcaacatgtctcaggagaatgtggacatgagggactcttacctgggttactccaccgagctggccctctggaaaggggtgcagagcctggtcctgggggccccccgctaccagcacaccgggaaggctgtcatcttcacccaggtgtccaggcaatggaggatgaaggccgaagtcacggggactcagatcggctcctacttcggggcctccctctgctccgtggacgtagacaccgacggcagcaccgacctggtcctcatcggggccccccattactacgagcagacccgagggggccaggtgtctgtgtgtcccttgcccagggggtggagaaggtggtggtgtgatgctgttctctacggggagcagggccacccctggggtcgctttggggcggctctgacagtgctgggggatgtgaatggggacaagctgacagacgtggtcatcggggccccaggagaggaggagaaccggggtgctgtctacctgtttcacggagtcttgggacccagcatcagcccctcccacagccagcggatcgcgggctcccagctctcctccaggctgcagtattttgggcaggcactgagcgggggtcaagacctcacccaggatggactggtggacctggctgtgggggcccggggccaggtgctcctgctcaggaccagacctgtgctctgggtgggggtgagcatgcagttcatacctgccgagatccccaggtctgcgtttgagtgtcgggagcaggtggtctctgagcagaccctggtacagtccaacatctgcctttacattgacaaacgttctaagaacctgcttgggagccgtgacctccaaagctctgtgaccttggacctggccctcgaccctggccgcctgagtccccgtgccaccttccaggaaacaaagaaccggagtctgagccgagtccgagtcctcgggctgaaggcacactgtgaaaacttcaacctgctgctcccgagctgcgtggaggactctgtgacccccattaccttgcgtctgaacttcacgctggtgggcaagcccctccttgccttcagaaacctgcggcctatgctggccgcactggctcagagatacttcacggcctccctaccctttgagaagaactgtggagccgaccatatctgccaggacaatctcggcatctccttcagcttcccaggcttgaagtccctgctggtggggagtaacctggagctgaacgcagaagtgatggtgtggaatgacggggaagactcctacggaaccaccatcaccttctcccaccccgcaggactgtcctaccgctacgtggcagagggccagaaacaagggcagctgcgttccctgcacctgacatgtgacagcgccccagttgggagccagggcacctggagcaccagctgcagaatcaaccacctcatcttccgtggcggcgcccagatcaccttcttggctacctttgacgtctcccccaaggctgtcctgggagaccggctgcttctgacagccaatgtgagcagtgagaacaacactcccaggaccagcaagaccaccttccagctggagctcccggtgaagtatgctgtctacactgtggttagcagccacgaacaattcaccaaatacctcaacttctcagagtctgaggagaaggaaagccatgtggccatgcacagataccaggtcaataacctgggacagagggacctgcctgtcagcatcaacttctgggtgcctgtggagctgaaccaggaggctgtgtggatggatgtggaggtctcccacccccagaacccatcccttcggtgctcctcagagaaaatcgcacccccagcatctgacttcctggcgcacattcagaagaatcccgtgctggactgctccattgctggctgcctgcggttccgctgtgacgtcccctccttcagcgtccaggaggagctggatttcaccctgaagggcaacctcagctttggctgggtccgccagatattgcagaagaaggtgtcggtcgtgagtgtggctgaaattacgttcgacacatccgtgtactcccagcttccaggacaggaggcatttatgagagctcagacgacaacggtgctggagaagtacaaggtccacaaccccacccccctcatcgtaggcagctccattgggggtctgttgctgctggcactcatcacagcggtactgtacaaagttggcttcttcaagcgtcagtacaaggaaatgatggaggaggcaaatggacaaattgccccagaaaacgggacacagacccccagcccgcccagtgagaaatgatccctctttgccttggacttcttctcccgcgattttccccacttacttaccctcacctgtcaggctgacggggaggaaccactgcaccaccgagagaggctgggatgggcctgcttcctgtctttgggagaaaacgtcttgcttgggaaggggcctttgtcttgtcaaggttccaactggaaacccttaggacagggtccctgctgtgttccccaaaaggacttgacttgcaatttctacctagaaatacatggacaatacccccaggcctcagtctcccttctcccatgaggcacgaatgatctttctttcctttccttttttttttttttcttttctttttttttttttttgagacggagtctcgctctgtcacccaggctggagtgcaatggcgtgatctcggctcgctgcaacctccgcctcccgggttcaagtaattctgctgtctcagcctcctgcgtagctgggactacaggcacacgccacctcgcccggcccgatctttctaaaatacagttctgaatatgctgctcatccccacctgtcttcaacagctccccattaccctcaggacaatgtctgaactctccagcttcgcgtgagaagtccccttccatcccagagggtgggcttcagggcgcacagcatgagagcctctgtgcccccatcaccctcgtttccagtgaattagtgtcatgtcagcatcagctcagggcttcatcgtggggctctcagttccgattccccaggctgaattgggagtgagatgcctgcatgctgggttctgcacagctggcctcccgcggttgggtcaacattgctggcctggaagggaggagcgccctctagggagggacatggccccggtgcggctgcagctcaccagccccaggggcagaagagacccaaccacttcctattttttgaggctatgaatatagtacctgaaaaaatgccaagcactagattatttttttaaaaagcgtactttaaatgtttgtgttaatacacattaaaacatcgcacaaaaacgatgcatctaccgctccttgggaaataatctgaaaggtctaaaaataaaaaagccttctgtggaaaaaaaaaaaaaaaaaaaaaaaaaaaaaaaaaaaaaaaaaaaaaaaaaa

SEQ ID NO: 1359 - DNA, 2066 bp; single-stranded, linear
  immediate source library: GENBANK
  immediate source clone: g35215
caaaacctaccagggcagctacggtttccgtctgggcttcttgcattctgggacagccaagtctgtgacttgcacgtactcccctgccctcaacaagatgttttgccaactggccaagacctgccctgtgcagctgtgggttgattccacacccccgcccggcacccgcgtccgcgccatggccatctacaagcagtcacagcacatgacggaggttgtgaggcgctgcccccaccatgagcgctgctcagatagcgatggtctggcccctcctcagcatcttatccgagtggaaggaaatttgcgtgtggagtatttggatgacagaaacacttttcgacatagtgtggtggtgccctatgagccgcctgaggttggctctgactgtaccaccatccactacaactacatgtgtaacagttcctgcatgggcggcatgaaccggaggcccatcctcaccatcatcacactggaagactccagtggtaatctactgggacggaacagctttgaggtgcgtgtttgtgcctgtcctgggagagaccggcgcacagaggaagagaatctccgcaagaaaggggagcctcaccacgagctgcccccagggagcactaagcgagcactgcccaacaacaccagctcctctccccagccaaagaagaaaccactggatggagaatatttcacccttcagatccgtgggcgtgagcgcttcgagatgttccgagagctgaatgaggccttggaactcaaggatgcccaggctgggaaggagccaggggggagcagggctcactccagccacctgaagtccaaaaagggtcagtctacctcccgccataaaaaactcatgttcaagacagaagggcctgactcagactgacattctccacttcttgttccccactgacagcctcccacccccatctctccctcccctgcgattttgggttttgggtctttgaacccttgcttgcaataggtgtgcgtcagaagcacccaggacttccatttgctttgtcccggggctccactgaacaagttggcctgcactggtgttttgttgtggggaggaggatggggagtaggacataccagcttagattttaaggtttttactgtgagggatgtttgggagatgtaagaaatgttcttgcagttaagggttagtttacaatcagccacattctaggtaggggcccacttcaccgtactaaccagggaagctgtccctcactgttgaattttctctaacttcaaggcccatatctgtgaaatgctggcatttgcacctacctcacagagtgcattgtgagggttaatgaaataatgtacatctggccttgaaaccaccttttattacatggggtctagaacttgacccccttgagggtgcttgttccctctccctgttggtcggtgggttggtagtttctacagttgggcagctggttaggtagagggagttgtcaagtctctgctggcccagccaaaccctgtctgacaacctcttggtgaaccttagatcctaaaaggaaatgtcaccccatcccacaccctggaggatttcatctcttgtatagatgatctggatccaccaagacttgttttagctcagggtccaatttcttttttctttttttttttttttttctttttctttgagactgggtctctttgttgccccaggctggagtggagtggcgtgatctggcttactgcagcctttgcctccccggctcgagcagtcctgcctcagcctccggagtagctgggaccacaggttcatgccaccatggccagccaacttttgcatgttttgtagagatggggtctcacagtgttgcccaggctggtctcaaactcctgggctcaggcgatccacctgtctcagcctcccagagtgctgggattacaattgtgagccaccacgtccagctggaagggtcaacatcttttacattctgcaagcacatctgcattttcaccccacccttcccctcttctccctttttatatcccatttttatatcgatctcttattttacaataaaactttgctgcca

SEQ ID NO: 1360 - DNA, 885 bp; single-stranded, linear
  immediate source library: GENBANK
  immediate source clone: g35443
cagctgtatcccatagagttgccacccaggcctcagccaggacctttcaggccagacaggagcacctgaccaaaggcttcacagccgccctcaccgcccggccttctacggtgtccagagacagttagccaggcctgggctgggcacactccaccttccctagtcaccagctggtttcccagaggagaaggctgagacccgagaagggagccagcctgtcccatgcctgcctggggagccctgttcctgctctgggccacagcagaggccaccaaggactgccccagcccatgtacctgccgcgccctggaaaccatggggctgtgggtggactgcaggggccacggactcacggccctgcctgccctgccggcccgcacccgccaccttctgctggccaacaacagccttcagtccgtgcccccgggagcctttgaccacctgccccagctgcagaccctcgatgtgacgcagaacccctggcactgtgactgcagcctcacctatctgcgcctctggctggaggaccgcacgcccgaggccctgctgcaggtccgctgtgccagccccagcctcgctgcccatggcccgctgcggctgacaggctaccagctgggcagctgtggctggcagctgcaggcgtcctgggtgcgcccgggggtcttgtgggacgtggcgctggtcgccgtggccgcgctgggcctggctcttctggctggcctgctgtgtgccaccacagaggccctggattgagccaggcccccagaacctggctccagccagggggccagtccctgaggcaggtccccagactccaccaagcctggtcagcccaaaccaccagaagcccagaataaactggcagctcagctgttttatataagc

SEQ ID NO: 1361 - DNA, 3321 bp; single-stranded, linear
  immediate source library: GENBANK
  immediate source clone: g35492
cagagccggcgcaggggaagcgcccggggccccgggtgcagcagcgcccgccgcctcccgggcctccccggcccgcagcccggggtcccgggccccggggccggcacctctcgggctccggctccccgcgcgcaagatggctgacccggctgcggggccgccgccgagcgagggcgaggagagcaccgtgcgcttcgcccgcaaaggcgccctccggcagaagaacgtgcatgaggtcaagaaccacaaattcaccgcccgcttcttcaagcagcccaccttctgcagccactgcaccgacttcatctggggcttcgggaagcagggattccagtgccaagtttgctgctttgtggtgcacaagcggtgccatgaatttgtcacattctcctgccctggcgctgacaagggtccagcctccgatgacccccgcagcaaacacaagtttaagatccacacgtactccagccccacgttttgtgaccactgtgggtcactgctgtatggactcatccaccaggggatgaaatgtgacacctgcatgatgaatgtgcacaagcgctgcgtgatgaatgttcccagcctgtgtggcacggaccacacggagcgccgcggccgcatctacatccaggcccacatcgacagggacgtcctcattgtcctcgtaagagatgctaaaaaccttgtacctatggaccccaatggcctgtcagatccctacgtaaaactgaaactgattcccgatcccaaaagtgagagcaaacagaagaccaaaaccatcaaatgctccctcaaccctgagtggaatgagacatttagatttcagctgaaagaatcggacaaagacagaagactgtcagtagagatttgggattgggatttgaccagcaggaatgacttcatgggatctttgtcctttgggatttctgaacttcagaaggccagtgttgatggctggtttaagttactgagccaggaggaaggcgagtacttcaatgtgcctgtgccaccagaaggaagtgaggccaatgaagaactgcggcagaaatttgagagggccaagatcagtcagggaaccaaggtcccggaagaaaagacgaccaacactgtctccaaatttgacaacaatggcaacagagaccggatgaaactgaccgattttaacttcctaatggtgctggggaaaggcagctttggcaaggtcatgctttcagaacgaaaaggcacagatgagctctatgctgtgaagatcctgaagaaggacgttgtgatccaagatgatgacgtggagtgcactatggtggagaagcgggtgttggccctgcctgggaagccgcccttcctgacccagctccactcctgcttccagaccatggaccgcctgtactttgtgatggagtacgtgaatgggggcgacctcatgtatcacatccagcaagtcggccggttcaaggagccccatgctgtattttacgctgcagaaattgccatcggtctgttcttcttacagagtaagggcatcatttaccgtgacctaaaacttgacaacgtgatgctcgattctgagggacacatcaagattgccgattttggcatgtgtaaggaaaacatctgggatggggtgacaaccaagacattctgtggcactccagactacatcgcccccgagataattgcttatcagccctatgggaagtccgtggattggtgggcatttggagtcctgctgtatgaaatgttggctgggcaggcaccctttgaaggggaggatgaagatgaactcttccaatccatcatggaacacaacgtagcctatcccaagtctatgtccaaggaagctgtggccatctgcaaagggctgatgaccaaacacccaggcaaacgtctgggttgtggacctgaaggcgaacgtgatatcaaagagcatgcatttttccggtatattgattgggagaaacttgaacgcaaagagatccagcccccttataagccaaaagcttgtgggcgaaatgctgaaaacttcgaccgatttttcacccgccatccaccagtcctaacacctcccgaccaggaagtcatcaggaatattgaccaatcagaattcgaaggattttcctttgttaactctgaatttttaaaacccgaagtcaagagctaagtagatgtgtagatctccgtccttcatttctgtcattcaagctcaacggctattgtggtgacatttttatgtttttcattgccaagttgcatccatgtttgattttctgatgagactagagtgacagtgtttcagaacccaaatgtcctcaggtagtttggagcatctctatgagatgggattatgcagatggcctatggaaaatgcagctgcataattaacacattatcaaagtcctcttacaatttattttccgcagcatgtcagctaagtagacccaatggggagagaaaatgcctgctttctttccctctttttctgcactgccatattcacccccaaccatccaatctgtggataattggatgttagcggtactcttccacttccggtcctggagcttggcttgtatccaagtgtatggttgctttgcctaagaggaatccctctatttcacctgttctggaggcaccagaccttgaaaagaacatgctcaaaataaaatgttatctgttatttttgtaaactcaaagttaagatgatcaaagttctaaaattccaagaatgtgcttttagacggtctcaatctaaaagcacttcaaggggtcaaagggcaaccagcttggtgctacctcagtgttgtagtttctgatactttatgtctttgctcaccctcatccccaaactacttgaaaagggcatttggcaccactctctgaaacaacacagtcactctagcaaggcccccaaagggccctggttttacattacatttcaaactttatttgctttggggttttgtttctgttgttgttcaaatgcaaaaaaaagaaaaaaaaaagaaaaaaaaaggtgactcacattgttacacatgctttaaaatatgtgttcaaatgttattaaccacaatgacgacctgttttgatttaaccaagaagacggctgcggagcctagcagactcaggcctgtgggaatgggatttgttacaaatctaggtttgttactggcttcagaaagctaattaagtgctctgaaaaagacaccgtttcttgaaacaaagatggttgtattcctcactttgatgttgttttgcaagatgtttgtggaaatgttcatttgtatctggatctctgttatgtgccatttttcttctagcatcgag

SEQ ID NO: 1362 - DNA, 2146 bp; single-stranded, linear
  immediate source library: GENBANK
  immediate source clone: g35500
cccaagatggaagggagcggcggccgcgtccgcctcaaggcgcattacgggggggacatcttcatcaccagcgtggacgccgccacgaccttcgaggagctctgtgaggaagtgagagacatgtgtcgtctgcaccagcagcacccgctcaccctcaagtgggtggacagcgaaggtgacccttgcacggtgtcctcccagatggagctggaagaggctttccgcctggcccgtcagtgcagggatgaaggcctcatcattcatgttttcccgagcacccctgagcagcctggcctgccatgtccgggagaagacaaatctatctaccgccggggagccagaagatggaggaagctgtaccgtgccaacggccacctcttccaagccaagcgctttaacaggagagcgtactgcggtcagtgcagcgagaggatatggggcctcgcgaggcaaggctacaggtgcatcaactgcaaactgctggtccataagcgctgccacggcctcgtcccgctgacctgcaggaagcatatggattctgtcatgccttcccaagagcctccagtagacgacaagaacgaggacgccgaccttccttccgaggagacagatggaattgcttacatttcctcatcccggaagcatgacagcattaaagacgactcggaggaccttaagccagttatcgatgggatggatggaatcaaaatctctcaggggcttgggctgcaggactttgacctaatcagagtcatcgggcgcgggagctacgccaaggttctcctggtgcggttgaagaagaatgaccaaatttacgccatgaaagtggtgaagaaagagctggtgcatgatgacgaggatattgactgggtacagacagagaagcacgtgtttgagcaggcatccagcaaccccttcctggtcggattacactcctgcttccagacgacaagtcggttgttcctggtcattgagtacgtcaacggcggggacctgatgttccacatgcagaggcagaggaagctccctgaggagcacgccaggttctacgcggccgagatctgcatcgccctcaacttcctgcacgagagggggatcatctacagggacctgaagctggacaacgtcctcctggatgcggacgggcacatcaagctcacagactacggcatgtgcaaggaaggcctgggccctggtgacacaacgagcactttctgcggaaccccgaattacatcgcccccgaaatcctgcggggagaggagtacgggttcagcgtggactggtgggcgctgggagtcctcatgtttgagatgatggccgggcgctccccgttcgacatcatcaccgacaacccggacatgaacacagaggactaccttttccaagtgatcctggagaagcccatccggatcccccggttcctgtccgtcaaagcctcccatgttttaaaaggatttttaaataaggaccccaaagagaggctcggctgccggccacagactggattttctgacatcaagtcccacgcgttcttccgcagcatagactgggacttgctggagaagaagcaggcgctccctccattccagccacagatcacagacgactacggtctggacaactttgacacacagttcaccagcgagcccgtgcagctgaccccagacgatgaggatgccataaagaggatcgaccagtcagagttcgaaggctttgagtatatcaacccattattgctgtccaccgaggagtcggtgtgaggccgcgtgcgtctctgtcgtggacacgcgtgattgaccctttaactgtatccttaaccaccgcatatgcatgccaggctgggcacggctccgagggcggccagggacagacgcttgcgccgagaccgcagagggaagcgtcagcgggcgctgctgggagcagaacagtccctcacacctggcccggcaggcagcttcgtgctggaggaacttgctgctgtgcctgcgtcgcggcggatccgcggggaccctgccgagggggctgtcatgcggtttccaaggtgcacattttccacggaaacagaactcgatgcactgacctgctccgccaggaaagtgagcgtgtagcgtcctgaggaataaaatgttccgatgaaaaaaaaaa

SEQ ID NO: 1363 - DNA, 5433 bp; single-stranded, linear
  immediate source library: GENBANK
  immediate source clone: g35567
ggggagattcgggaccatggcacctgtgcacggcgacgactctctgtcagattcagggagttttgtatcttctcgagcccggcgagaaaaaaaatcaaagaaggggcgccaagaagccctagaaagactgaaaaaggctaaagctggtgagaagtataaatatgaagtcgaggacttcacaggtgtttatgaagaagttgatgaagaacagtattcgaagctggttcaggcacgccaggatgatgactggattgtggatgatgatggtattggctatgtggaagatggccgagagatttttgatgatgaccttgaagatgatgcccttgatgctgatgagaaaggaaaagatggtaaagcacgcaataaagacaagaggaatgtaaagaagctcgcagtgacaaaaccgaacaacattaagtcaatgttcattgcttgtgctggaaagaaaactgcagataaagctgtagacttgtccaaggatggtctgctaggtgacattctacaggatcttaacactgagacacctcaaataactccaccacctgtaatgatactgaagaagaaaagatccattggagcttcaccgaatcctttctctgtgcacaccgccacggcagttccttcaggaaaaattgcttcccctgtctccagaaaggagcctccattaactcctgttcctcttaaacgtgctgaatttgctggcgatgatgtacaggtcgagagtacagaagaagagcaggagtcaggggcaatggagtttgaagatggtgactttgatgagcccatggaagttgaagaggtggacctggagcctatggctgccaaggcttgggacaaagagagtgagccagcagaggaagtgaaacaagaggcggattctgggaaagggaccgtgtcctacttaggaagttttctcccggatgtctcttgttgggacattgatcaagaaggtgatagcagtttctcagtgcaagaagttcaagtggattccagtcacctcccattggtaaaaggggcagatgaggaacaagtattccacttttattggttggatgcttatgaggatcagtacaaccaaccaggtgtggtatttctgtttgggaaagtttggattgaatcagccgagacccatgtgagctgttgtgtcatggtgaaaaatatcgagcgaacgctttacttccttccccgtgaaatgaaaattgatctaaatacggggaaagaaacaggaactccaatttcaatgaaggatgtttatgaggaatttgatgagaaaatagcaacaaaatataaaattatgaagttcaagtctaagccagtggaaaagaactatgcttttgagatacctgatgttccagaaaaatctgagtacttggaagttaaatactcggctgaaatgccacagcttcctcaagatttgaaaggagaaactttttctcatgtatttgggaccaacacatctagcctggaactgttcttgatgaacagaaagatcaaaggaccttgttggcttgaagtaaaaaagtccacagctcttaatcagccagtcagttggtgtaaagttgaggcaatggctttgaaaccagacctggtgaatgtaattaaggatgtcagtccaccaccgcttgtcgtgatggctttcagcatgaagacaatgcagaatgcaaagaaccatcaaaatgagattattgctatggcagctttggtccatcacagttttgcattggataaagcagccccaaagcctccctttcagtcacacttctgtgttgtgtctaaaccaaaggactgtatttttccatatgctttcaaagaagtcattgagaaaaagaatgtgaaggttgaggttgctgcaacagaaagaacactgctaggttttttccttgcaaaagttcacaaaattgatcctgatatcattgtgggtcataatatttatgggtttgaactggaagtactactgcagagaattaatgtgtgcaaagctcctcactggtccaagataggtcgactgaagcgatccaacatgccaaagcttgggggccggagtggatttggtgaaagaaatgctacctgtggtcgaatgatctgtgatgtggaaatttcagcaaaggaattgattcgttgtaaaagctaccatctgtctgaacttgttcagcagattctaaaaactgaaagggttgtaatcccaatggaaaatatacaaaatatgtacagtgaatcttctcaactgttatacctgttggaacacacctggaaagatgccaagttcattttgcagatcatgtgtgagctaaatgttcttccattagcattgcagatcactaacatcgctgggaacattatgtccaggacgctgatgggtggacgatccgagcgtaacgagttcttgttgcttcatgcattttacgaaaacaactatattgtgcctgacaagcagattttcagaaagcctcagcaaaaactgggagatgaagatgaagaaattgatggagataccaataaatacaagaaaggacgtaagaaaggagcttatgctggaggcttggttttggaccccaaagttggtttttatgataagttcattttgcttctggacttcaacagtctatatccttccatcattcaggaatttaacatttgttttacaacagtacaaagagttgcttcagaggcacagaaagttacagaggatggagaacaagaacagatccctgagttgccagatccaagcttagaaatgggcattttgcccagagagatccggaaactggtagaacggagaaaacaagtcaaacagctaatgaaacagcaagacttaaatccagaccttattcttcagtatgacattcgacagaaggctttgaagctcacagcgaacagtatgtatggttgcctgggattttcctatagcagattttacgccaaaccactggctgccttggtgacatacaaaggaagggagattttgatgcatacgaaagagatggtacaaaagatgaatcttgaagttatttatggagatacagattcaattatgataaacaccaatagcaccaatctggaagaagtatttaagttgggaaacaaggtaaaaagtgaagtgaataagttgtacaaactgcttgaaatagacattgatggggttttcaagtctctgctactgctgaaaaaaaagaagtacgctgctctggttgttgagccaacgtcggatgggaattatgtcaccaaacaggagctcaaaggattagatatagttagaagagattggtgtgatcttgctaaagacactggaaactttgtgattggccagattctttctgatcaaagccgggacactatagtggaaaacattcagaagaggctgatagaaattggagaaaatgtgctaaatggcagtgtcccagtgagccagtttgaaattaacaaggcattgacaaaggatccccaggattaccctgataaaaaaagcctacctcatgtacatgttgccctctggataaattctcaaggaggcagaaaggtgaaagctggagatactgtgtcatatgtcatctgtcaggatggatcaaacctcactgcaagtcagagggcctatgcgcctgagcagctgcagaaacaggataatctaaccattgacacccagtactacctggcccagcagatccacccagtcgtggctcggatctgtgaaccaatagacggaattgatgctgtcctcattgcaacgtggttgggacttgaccccacccaatttagagttcatcattatcataaagatgaagagaatgatgctctacttggtggcccagcacagctcactgatgaagagaaatacagggactgtgaaagattcaaatgtccatgccctacatgtggaactgagaatatttatgataatgtctttgatggttcgggaacagatatggagcccagcttgtatcgttgcagtaacatcgattgtaaggcttcacctctgacctttacagtacaactgagcaacaaattgatcatggacattagacgtttcattaaaaagtactatgatggctggttgatatgtgaagagccaacctgtcgcaatcgaactcgtcaccttccccttcaattctcccgaactgggcctctttgcccagcctgcatgaaagctacacttcaaccagagtattctgacaagtccctgtacacccagctgtgcttttaccggtacatttttgatgcggagtgtgcactggagaaacttactaccgatcatgagaaagataaattgaagaagcaattttttacccccaaagttctgcaggactacagaaaactcaagaacacagcagagcaattcttgtcccgaagtggctactccgaagtgaatctgagcaaactcttcgctggttgtgccgtgaaatcctaagggaatcccaggagtaaccaaggagggggtagttgaaaaatcccagcttcctctgtgcctccactctggccctaaatgctcctccagcatctgtttctcccttgggactgtgtctcatgtttgtgtgaatgtagaccaggaaagggggctgcaaaaatgttgagtctaatgttcgtaagcatcatagaaattcctgtcttcatattaagatgtactgctttaaaacacaactccagagcccctccccaagctcccctccccaagctcctgaagacccggtttctgagggagggaaattgctacttggattgagagtagctggaatgtaagtgaccccaggctttgctcagggcctttagcctatgtcccccccacataaagagagcttctcagagcctgactgaagagctgacgttttgctttttcatatgccaattaaacccggtctaaatccaaatgcttctccagccatccaggagtggctgtccttttcagtcttgtcttttatataggtagctgagggggaagatttagaagccttgcactcactaaatagattaaacagagcaggcttgtttgttgaattgctccaaagtccaacagacacacactgagcaggtgttttacactcacattccctttttgccccttaaatagaaagtgcaggtaaaggtttatacaacaagaaagcacattgaaaataatttgatactctaacaatccattaacatgtgtaggggttacggtgaggatcatgtgttgtattcgaaaaacggggagagggatgcttaattggccctcgcttgctatttttttctcatttcttcacaataggaccgtctttggcagcagcaaaatgtatttcagtatggcagtctttcctctcttacattattggtaagattatactaacaaaatgtttccccttgtacaattatgctgtgtttttaaaaaacattgacctgtgtgtttttataaaagaaaaagtatgttgtgccttcttcttaagaataaagttttctaaaggg

SEQ ID NO: 1364 - DNA, 2848 bp; single-stranded, linear
  immediate source library: GENBANK
  immediate source clone: g35569
ccttctccccggcggttagtgctgagagtgcggagtgtgtgctccgggctcggaacacacatttattattaaaaaatccaaaaaaaatctaaaaaaatcttttaaaaaaccccaaaaaaatttacaaaaaatccgcgtctcccccgccggagacttttattttttttcttcctcttttataaaataacccggtgaagcagccgagaccgacccgcccgcccgcggccccgcagcagctccaagaaggaaccaagagaccgaggccttcccgctgcccggacccgacaccgccaccctcgctccccgccggcagccggcagccagcggcagtggatcgaccccgttctgcggccgttgagtagttttcaattccggttgatttttgtccctctgcgcttgctccccgctcccctccccccggctccggcccccagccccggcactcgctctcctcctctcacggaaaggtcgcggcctgtgccctgcgggcagccgtgccgagatgaaccccagtgcccccagctaccccatggcctcgctctacgtgggggacctccaccccgacgtgaccgaggcgatgctctacgagaagttcagcccggccgggcccatcctctccatccgggtctgcagggacatgatcacccgccgctccttgggctacgcgtatgtgaacttccagcagccggcggacgcggagcgtgctttggacaccatgaattttgatgttataaagggcaagccagtacgcatcatgtggtctcagcgtgatccatcacttcgcaaaagtggagtaggcaacatattcattaaaaatctggacaaatccattgataataaagcactgtatgatacattttctgcttttggtaacatcctttcatgtaaggtggtttgtgatgaaaatggttccaagggctacggatttgtacactttgagacgcaggaagcagctgaaagagctattgaaaaaatgaatggaatgctcctaaatgatcgcaaagtatttgttggacgatttaagtctcgtaaagaacgagaagctgaacttggagctagggcaaaagaattcaccaatgtttacatcaagaattttggagaagacatggatgatgagcgccttaaggatctctttgggcctgccttaagtgtgaaagtaatgactgatgaaagtggaaaatccaaaggatttggatttgtaagctttgaaaggcatgaagatgcacagaaagctgtggatgagatgaacggaaaggagctcaatggaaaacaaatttatgttggtcgagctcagaaaaaggtggaacggcagacggaacttaagcgcaaatttgaacagatgaaacaagataggatcaccagataccagggtgttaatctttatgtgaaaaatcttgatgatggtattgatgatgaacgtctccggaaagagttttctccatttggtacaatcactagtgcaaaggttatgatggagggtggtcgcagcaaagggtttggttttgtatgtttctcctccccagaagaagccactaaagcagttacagaaatgaacggtagaattgtggccacaaagccattgtatgtagctttagctcagcgcaaagaagagcgccaggctcacctcactaaccagtatatgcagagaatggcaagtgtacgagctgttcccaaccctgtaatcaacccctaccagccagcacctccttcaggttacttcatggcagctatcccacagactcagaaccgtgctgcatactatcctcctagccaagttgctcaactaagaccaagtcctcgctggactgctcagggtgccagacctcatccattccaaaatatgcccggtgctatccgcccagctgctcctagaccaccatttagtactatgagaccagcttcttcacaggttccacgagtcatgtcaacacagcgtgttgctaacacatcaacacagacaatgggtccacgtcctgcagctgcagccgctgcagctactcctgctgtccgcaccgttccacagtataaatatgctgcaggagttcgcaatcctcagcaacatcttaatgcacagccacaagttacaatgcaacagcctgctgttcatgtacaaggtcaggaacctttgactgcttccatgttggcatctgcccctcctcaagagcaaaagcaaatgttgggtgaacggctgtttcctcttattcaagccatgcaccctactcttgctggtaaaatcactggcatgttgttggagattgataattcagaacttcttcatatgctcgagtctccagagtcactccgttctaaggttgatgaagctgtagctgtactacaagcccaccaagctaaagaggctgcccagaaagcagttaacagtgccaccggtgttccaactgtttaaaattgatcagggaccatgaaaagaaacttgtgcttcaccgaagaaaaatatctaaacatcgaaaaacttaaatattatggaaaaaaaacattgcaaaatataaaataaataaaaaaaggaaaggaaactttgaaccttatgtaccgagcaaatgccaggtctagcaaacataatgctagtcctagattacttattgatttaaaaacaaaaaaacacaaaaaatagtaaaatataaaaacaaattaatgttttatagaccctgggaaaaagaattttcagcaaagtacaaaaatttaaagcattcctttctttaattttgtaattctttactgtggaatagctcagaatgtcagttctgttttaagtaacagaattgataactgagcaaggaaacgtaatttggattataaaattcttgctttaataaaaattccttaaacagtg

SEQ ID NO: 1365 - DNA, 4242 bp; single-stranded, linear
  immediate source library: GENBANK
  immediate source clone: g35631
ggcgcagtagcagcgagcagcagagtccgcacgctccggcgaggggcagaagagcgcgagggagcgcggggcagcagaagcgagagccgagcgcggacccagccaggacccacagccctccccagctgcccaggaagagccccagccatggaacaccagctcctgtgctgcgaagtggaaaccatccgccgcgcgtaccccgatgccaacctcctcaacgaccgggtgctgcgggccatgctgaaggcggaggagacctgcgcgccctcggtgtcctacttcaaatgtgtgcagaaggaggtcctgccgtccatgcggaagatcgtcgccacctggatgctggaggtctgcgaggaacagaagtgcgaggaggaggtcttcccgctggccatgaactacctggaccgcttcctgtcgctggagcccgtgaaaaagagccgcctgcagctgctgggggccacttgcatgttcgtggcctctaagatgaaggagaccatccccctgacggccgagaagctgtgcatctacaccgacaactccatccggcccgaggagctgctgcaaatggagctgctcctggtgaacaagctcaagtggaacctggccgcaatgaccccgcacgatttcattgaacacttcctctccaaaatgccagaggcggaggagaacaaacagatcatccgcaaacacgcgcagaccttcgttgccctctgtgccacagatgtgaagttcatttccaatccgccctccatggtggcagcggggagcgtggtggccgcagtgcaaggcctgaacctgaggagccccaacaacttcctgtcctactaccgcctcacacgcttcctctccagagtgatcaagtgtgacccagactgcctccgggcctgccaggagcagatcgaagccctgctggagtcaagcctgcgccaggcccagcagaacatggaccccaaggccgccgaggaggaggaagaggaggaggaggaggtggacctggcttgcacacccaccgacgtgcgggacgtggacatctgagggcgccaggcaggcgggcgccaccgccacccgcagcgagggcggagccggccccaggtgctccactgacagtccctcctctccggagcattttgataccagaagggaaagcttcattctccttgttgttggttgttttttcctttgctctttcccccttccatctctgacttaagcaaaagaaaaagattacccaaaaactgtctttaaaagagagagagagaaaaaaaaaatagtatttgcataaccctgagcggtgggggaggagggttgtgctacagatgatagaggattttataccccaataatcaactcgtttttatattaatgtacttgtttctctgttgtaagaataggcattaacacaaaggaggcgtctcgggagaggattaggttccatcctttacgtgtttaaaaaaaagcataaaaacattttaaaaacatagaaaaattcagcaaaccatttttaaagtagaagagggttttaggtagaaaaacatattcttgtgcttttcctgataaagcacagctgtagtggggttctaggcatctctgtactttgcttgctcatatgcatgtagtcactttataagtcattgtatgttattatattccgtaggtagatgtgtaacctcttcaccttattcatggctgaagtcacctcttggttacagtagcgtagcgtggccgtgtgcatgtcctttgcgcctgtgaccaccaccccaacaaaccatccagtgacaaaccatccagtggaggtttgtcgggcaccagccagcgtagcagggtcgggaaaggccacctgtcccactcctacgatacgctactataaagagaagacgaaatagtgacataatatattctatttttatactcttcctatttttgtagtgacctgtttatgagatgctggttttctacccaacggccctgcagccagctcacgtccaggttcaacccacagctacttggtttgtgttcttcttcatattctaaaaccattccatttccaagcactttcagtccaataggtgtaggaaatagcgctgtttttgttgtgtgtgcagggagggcagttttctaatggaatggtttgggaatatccatgtacttgtttgcaagcaggactttgaggcaagtgtgggccactgtggtggcagtggaggtggggtgtttgggaggctgcgtgccagtcaagaagaaaaaggtttgcattctcacattgccaggatgataagttcctttccttttctttaaagaagttgaagtttaggaatcctttggtgccaactggtgtttgaaagtagggacctcagaggtttacctagagaacaggtggtttttaagggttatcttagatgtttcacaccggaaggtttttaaacactaaaatatataatttatagttaaggctaaaaagtatatttattgcagaggatgttcataaggccagtatgatttataaatgcaatctccccttgatttaaacacacagatacacacacacacacacacacacacacaaaccttctgcctttgatgttacagatttaatacagtttatttttaaagatagatccttttataggtgagaaaaaaacaatctggaagaaaaaaaccacacaaagacattgattcagcctgtttggcgtttcccagagtcatctgattggacaggcatgggtgcaaggaaaattagggtactcaacctaagttcggttccgatgaattcttatcccctgccccttcctttaaaaaacttagtgacaaaatagacaatttgcacatcttggctatgtaattcttgtaatttttatttaggaagtgttgaagggaggtggcaagagtgtggaggctgacgtgtgagggaggacaggcgggaggaggtgtgaggaggaggctcccgaggggaaggggcggtgcccacaccggggacaggccgcagctccattttcttattgcgctgctaccgttgacttccaggcacggtttggaaatattcacatcgcttctgtgtatctctttcacattgtttgctgctattggaggatcagttttttgttttacaatgtcatatactgccatgtactagttttagttttctcttagaacattgtattacagatgccttttttgtagttttttttttttttatgtgatcaattttgacttaatgtgattactgctctattccaaaaaggttgctgtttcacaatacctcatgcttcacttagccatggtggacccagcgggcaggttctgcctgctttggcgggcagacacgcgggcgcgatcccacacaggctggcgggggccggccccgaggccgcgtgcgtgagaaccgcgccggtgtccccagagaccaggctgtgtccctcttctcttccctgcgcctgtgatgctgggcacttcatctgatcgggggcgtagcatcatagtagtttttacagctgtgttatctttgcgtgtagctatggaagttgcataattattattattattattataacaagtgtgtcttacgtgccaccacggcgttgtacctgtaggactctcattcgggatgattggaatagcttctggaatttgttcaagttttgggtatgtttaatctgttatgtactagtgttctgtttgttattgttttgttaattacaccataatgctaatttaaagagactccaaatctcaatgaagccagctcacagtgctgtgtgccccggtcacctagcaagctgccgaaccaaaagaatttgcaccccgctgcgggcccacgtggttggggccctgccctggcagggtcatcctgtgctcggaggccatctcgggcacaggcccaccccgccccacccctccagaacacggctcacgcttacctcaaccatcctggctgcggcgtctgtctgaaccacgcgggggccttgagggacgctttgtctgtcgtgatggggcaagggcacaagtcctggatgttgtgtgttcgagaggccaaaggctggtggcaagtgcacggggcacagcggagtctgtcctgtgacgcgcaagtctgagggtctgggcggcgggcggctgggtctgtgcatttctggttgcaccgcggcgcttcccagcaccaacatgtaaccggcatgtttccagcagaagacaaaaagacaaacatgaaagtctagaaataaaactggtaaaaccccaaaaaaaaaaaaaaaa

SEQ ID NO: 1366 - DNA, 6075 bp; single-stranded, linear
  immediate source library: GENBANK
  immediate source clone: g35787
gtctcctctggatcttaactactgagcgcaatgctgagccatggagccgggttggccttgtggatcacactgagcctgctgcagactggactggcggagccagagagatgtaacttcaccctggcggagtccaaggcctccagccattctgtgtctatccagtggagaattttgggctcaccctgtaactttagcctcatctatagcagtgacaccctgggggccgcgttgtgccctacctttcggatagacaacaccacatacggatgtaaccttcaagatttacaagcaggaaccatctataacttcaagattatttctctggatgaagagagaactgtggtcttgcaaacagatcctttacctcctgctaggtttggagtcagtaaagagaagacgacttcaaccggcttgcatgtttggtggactccttcttccggaaaagtcacctcatatgaggtgcaattatttgatgaaaataaccaaaagatacagggggttcaaattcaagaaagtacttcatggaatgaatacacttttttcaatctcactgctggtagtaaatacaatattgccatcacagctgtttctggaggaaaacgttctttttcagtttataccaatggatcaacagtgccatctccagtgaaagatattggtatttccacaaaagccaattctctcctgatttcctggtcccatggttctgggaatgtggaacgataccggctgatgctaatggataaagggatcctagttcatggcggtgttgtggacaaacatgctacttcctatgcttttcacgggctgtcccctggctacctctacaacctcactgttatgactgaggctgcagggctgcaaaactacaggtggaaactagtcaggacagcccccatggaagtctcaaatctgaaggtgacaaatgatggcagtttgacctctctaaaagtcaaatggcaaagacctcctggaaatgtggattcttacaatatcaccctgtctcacaaagggaccatcaaggaatccagagtattagcaccttggattactgaaactcactttaaagagttagtccccggtcgactttatcaagttactgtcagctgtgtctctggtgaactgtctgctcagaagatggcagtgggcagaacatttccagacaaagttgcaaacctggaggcaaacaataatggcaggatgaggtctcttgtagtgagctggtcgccccctgctggagactgggagcagtatcggatcctactcttcaatgattctgtggtgctgctcaacatcactgtgggaaaggaagaaacacagtatgtcatggatgacacggggctcgtaccgggaagacagtatgaggtggaagtcattgttgagagtggaaatttgaagaattctgagcgttgccaaggcaggacagtccccctggctgtcctccagcttcgtgtcaaacatgccaatgaaacctcactgagtatcatgtggcagacccctgtagcagaatgggagaaatacatcatttccctagctgacagagacctcttactgatccacaagtcactctccaaagatgccaaagaattcacttttactgacctggtgcctggacgaaaatacatggctacagtcaccagtattagtggagacttaaaaaattcctcttcagtaaaaggaagaacagtgcctgcccaagtgactgacttgcatgtggccaaccaaggaatgaccagtagtctgtttactaactggacccaggcacaaggagacgtagaattttaccaagtcttactgatccatgaaaatgtggtcattaaaaatgaaagcatctccagtgagaccagcagatacagcttccactctctcaagtccggcagcctgtactccgtggtggtaacaacagtgagtggagggatctcttcccgacaagtggttgtggagggaagaacagtcccttccagtgtgagtggagtaacggtgaacaattccggtcgtaatgactacctcagcgtttcctggctcgtggcgcccggagatgtggataactatgaggtaacattgtctcatgacggcaaggtggttcagtcccttgtcattgccaagtctgtcagagaatgttccttcagctccctcaccccaggccgcctctacaccgtgaccataactacaaggagtggcaagtatgaaaatcactccttcagccaagagcggacagtgcctgacaaagtccagggagtcagtgttagcaactcagccaggagtgactatttaagggtatcctgggtgcatgccactggagactttgatcactatgaagtcaccattaaaaacaaaaacaacttcattcaaactaaaagcattcccaagtcagaaaacgaatgtgtatttgttcagctagtccctggacggttgtacagtgtcactgttactacaaaaagtggacaatatgaagccaatgaacaagggaatgggagaacaattccagagcctgttaaggatctaacattgcgcaacaggagcactgaggacttgcatgtgacttggtcaggagctaatggggatgtcgaccaatatgagatccagctgctcttcaatgacatgaaagtatttcctccttttcaccttgtaaataccgcaaccgagtatcgatttacttccctaacaccaggccgccaatacaaaattcttgtcttgacgattagcggggatgtacagcagtcagccttcattgagggcttcacagttcctagtgctgtcaaaaatattcacatttctcccaatggagcaacagatagcctgacggtgaactggactcctggtgggggagacgttgattcctacacggtgtcggcattcaggcacagtcaaaaggttgactctcagactattcccaagcacgtctttgagcacacgttccacagactggaggccggggagcagtaccagatcatgattgcctcagtcagcgggtccctgaagaatcagataaatgtggttgggcggacagttccagcatctgtccaaggagtaattgcagacaatgcatacagcagttattccttaatagtaagttggcaaaaagctgctggtgtggcagaaagatatgatatcctgcttctaactgaaaatggaatccttctgcgcaacacatcagagccagccaccactaagcaacacaaatttgaagatctaacaccaggcaagaaatacaagatacagatcctaactgtcagtggaggcctctttagcaaggaagcccagactgaaggccgaacagtcccagcagctgtcaccgacctgaggatcacagagaactccaccaggcacctgtccttccgctggaccgcctcagagggggagctcagctggtacaacatctttttgtacaacccagatgggaatctccaggagagagctcaagttgacccactagtccagagcttctctttccagaacttgctacaaggcagaatgtacaagatggtgattgtaactcacagtggggagctgtctaatgagtctttcatatttggtagaacagtcccagcctctgtgagtcatctcagggggtccaatcggaacacgacagacagcctttggttcaactggagtccagcctctggggactttgacttttatgagctgattctctataatcccaatggcacaaagaaggaaaactggaaagacaaggacctgacggagtggcggtttcaaggccttgttcctggaaggaagtacgtgctgtgggtggtaactcacagtggagatctcagcaataaagtcacagcggagagcagaacagctccaagtcctcccagtcttatgtcatttgctgacattgcaaacacatccttggccatcacgtggaaagggcccccagactggacagactacaacgactttgagctgcagtggttgcccagagatgcacttactgtcttcaacccctacaacaacagaaaatcagaaggacgcattgtgtatggtcttcgtccagggagatcctatcaattcaacgtcaagactgtcagtggtgattcctggaaaacttacagcaaaccaatttttggatctgtgaggacaaagcctgacaagatacaaaacctgcattgccggcctcagaactccacggccattgcctgttcttggatccctcctgattctgactttgatggttatagtattgaatgccggaaaatggacacccaagaagttgagttttccagaaagctggagaaagaaaaatctctgctcaacatcatgatgctagtgccccataagaggtacctggtgtccatcaaagtgcagtcggccggcatgaccagcgaggtggttgaagacagcactatcacaatgatagaccgcccccctcctccacccccacacattcgtgtgaatgaaaaggatgtgctaattagcaagtcttccatcaactttactgtcaactgcagctggttcagcgacaccaatggagctgtgaaatacttcacagtggtggtgagagaggctgatggcagtgatgagctgaagccagaacagcagcaccctctcccttcctacctggagtacaggcacaatgcctccattcgggtgtatcagactaattattttgccagcaaatgtgccgaaaatcctaacagcaactccaagagttttaacattaagcttggagcagagatggagagcttaggtggaaaacgcgatcccactcagcaaaaattctgtgatggaccactgaagccacacactgcctacagaatcagcattcgagcttttacacagctctttgatgaggacctgaaggaattcacaaagccactctattcagacacatttttttctttacccatcactactgaatcagagcccttgtttggagctattgaaggtgtgagtgctggtctgtttttaattggcatgctagtggctgttgttgccttattgatctgcagacagaaagtgagccatggtcgagaaagaccctctgcccgtctgagcattcgtagggatcgaccattatctgtccacttaaacctgggccagaaaggtaaccggaaaacttcttgtccaataaaaataaatcagtttgaagggcatttcatgaagctacaggctgactccaactaccttctatccaaggaatacgaggagttaaaagacgtgggccgaaaccagtcatgtgacattgcactcttgccggagaatagagggaaaaatcgatacaacaatatattgccctatgatgccacgcgagtgaagctctccaatgtagatgatgatccttgctctgactacatcaatgccagctacatccctggcaacaacttcagaagagaatacattgtcactcagggaccgcttcctggcaccaaggatgacttctggaaaatggtgtgggaacaaaacgttcacaacatcgtcatggtgacccagtgtgttgagaagggccgagtaaagtgtgaccattactggccagcggaccaggattccctctactatggggacctcatcctgcagatgctctcagagtccgtcctgcctgagtggaccatccgggagtttaagatatgcggtgaggaacagcttgatgcacacagactcatccgccactttcactatacggtgtggccagaccatggagtcccagaaaccacccagtctctgatccagtttgtgagaactgtcagggactacatcaacagaagcccgggtgctgggcccactgtggtgcactgcagtgctggtgtgggtaggactggaacctttattgcattggaccgaatcctccagcagttagactccaaagactctgtggacatttatggagcagtgcacgacctaagacttcacagggttcacatggtccagactgagtgtcagtatgtctacctacatcagtgtgtaagagatgtcctcagagcaagaaagctacggagtgaacaagaaaaccccttgtttccaatctatgaaaatgtgaatccagagtatcacagagatccagtctattcaaggcattgagaatgtacctgaagagctcctggataaaaattattcactgtgtgatttgtt

SEQ ID NO: 1367 - DNA, 1839 bp; single-stranded, linear
  immediate source library: GENBANK
  immediate source clone: g35795
aattctgaagaagataatagagtcacaagtgtatcctcagacagtcaaactggtatggacagaagtcctggtaaatcaccatcagcaaatgggctatcccaaaagcacaatgatggaaaagaggaaaatgacattcagactggtagtgctctgcttcctctcagccctgaatctaaagcatgggcagttctgacaagtgatgaagaaagtggatcagggcaaggtacctcagatagccttaatgagaatgagacttccacagatttcagttttgcagacactaatgaaaaagatgctgatgggatcctggcagcaggtgactcagaaataactcctggattcccacagtccccaacatcatctgttactagcgagaactcagaagtgttccacgtttcagaggcagaggccagtaatagtagccatgagtctcgtattggtctagctgaggggttggaatccgagaagaaggcagttataccccttgtgatcgtgtcagccctgacttttatctgtctagtggttcttgtgggtattctcatctactggaggaaatgcttccagactgcacacttttacttagaggacagtacatcccctagagttatatccacacctccaacacctatctttccaatttcagatgatgtcggagcaattccaataaagcactttccaaagcatgttgcagatttacatgcaagtagtgggtttactgaagaatttgagacactgaaagagttttaccaggaagtgcagagctgtactgttgacttaggtattacagcagacagctccaaccacccagacaacaagcacaagaatcgatacataaatatcgttgcctatgatcatagcagggttaagctagcacagcttgctgaaaaggatggcaaactgactgattatatcaatgccaattatgttgatggctacaacagaccaaaagcttatattgctgcccaaggcccactgaaatccacagctgaagatttctggagaatgatatgggaacataatgtggaagttattgtcatgataacaaacctcgtcgagaaaggaaggagaaaatgtgatcagtactggcctgccgatgggagtgaggagtacgggaactttctggtcactcagaagagtgtgcaagtgcttgcctattatactgtgaggaattttactctaagaaacacaaaaataaaaaagggctcccagaaaggaagacccagtggacgtgtggtcacacagtatcactacacgcagtggcctgacatgggagtaccagagtactccctgccagtgctgacctttgtgagaaaggcagcctatgccaagcgccatgcagtggggcctgttgtcgtccactgcagtgctggagttggaagaacaggcacatatattgtgctagacagtatgttgcagcagattcaacacgaaggaactgtcaacatatttggcttcttaaaacacatccgttcacaaagaaattatttggtacaaactgaggagcaatatgtcttcattcatgatacactggttgaggccatacttagtaaagaaactgaggtgctggacagtcatattcatgcctatgttaatgcactcctcattcctggaccagcaggcaaaacaaagctagagaaacaattccagctcctgagccagtcaaatatacagcagagtgactattctgcagccctaaagcaatgcaacagggaaaagaatcgaacttcttctatcatccctgtggaaagatcaagggttggcatttcatccctgagtggagaaggcacagactacatcaatgcctcctatatcatgggctattaccagagcaatgaattc

SEQ ID NO: 1368 - DNA, 1078 bp; single-stranded, linear
  immediate source library: GENBANK
  immediate source clone: g35798
aagaacaattgtctctggacggcagctatgcgactcaccgtgctgtgtgctgtgtgcctgctgcctggcagcctggccctgccgctgcctcaggaggcgggaggcatgagtgagctacagtgggaacaggctcaggactatctcaagagattttatctctatgactcagaaacaaaaaatgccaacagtttagaagccaaactcaaggagatgcaaaaattctttggcctacctataactggaatgttaaactcccgcgtcatagaaataatgcagaagcccagatgtggagtgccagatgttgcagaatactcactatttccaaatagcccaaaatggacttccaaagtggtcacctacaggatcgtatcatatactcgagacttaccgcatattacagtggatcgattagtgtcaaaggctttaaacatgtggggcaaagagatccccctgcatttcaggaaagttgtatggggaactgctgacatcatgattggctttgcgcgaggagctcatggggactcctacccatttgatgggccaggaaacacgctggctcatgcctttgcgcctgggacaggtctcggaggagatgctcacttcgatgaggatgaacgctggacggatggtagcagtctagggattaacttcctgtatgctgcaactcatgaacttggccattctttgggtatgggacattcctctgatcctaatgcagtgatgtatccaacctatggaaatggagatccccaaaattttaaactttcccaggatgatattaaaggcattcagaaactatatggaaagagaagtaattcaagaaagaaatagaaacttcaggcagaacatccattcattcattcattggattgtatatcattgttgcacaatcagaattgataagcactgttcctccactccatttagcaattatgtcacccttttttattgcagttggtttttgaatgtctttcactccttttattggttaaactcctttatggtgtgactgtgtcttattccatctatgagctttgtcagtgcgcgtagatgtcaataaatgttacatacacaaata

SEQ ID NO: 1369 - DNA, 3075 bp; single-stranded, linear
  immediate source library: GENBANK
  immediate source clone: g36064
ggggaaggggatttggattgttgcgcctctgctctgaagaaagtgctgtctggctccaactccagttctttcccctgagcaacgcctggaacctaacccttcccactctgtcaccttctcgatcccgccggcgctttagagcggcagtccagtcttggatccttcagagcctcagccactagctgcgatgcatgtgatcaagcgagatggccgccaagaacgagtcatgtttgacaaaattacatctcgaatccagaagctttgttatggactcaatatggattttgttgatcctgctcagatcaccatgaaagtaatccaaggcttgtacagtggggtcaccacagtggaactagatactttggctgctgaaacagctgcaaccttgactactaagcaccctgactatgctatcctggcagccaggatcgctgtctctaacttgcacaaagaaacaaagaaagtgttcagtgatgtgatggaagacctctataactacataaatccacataatggcaaacactctcccatggtggccaagtcaacattggatattgttctggccaataaagatcgcctgaattctgctattatctatgaccgagatttctcttacaattacttcggctttaagacgctagagcggtcttatttgttgaagatcaatggaaaagtggctgaaagaccacaacatatgttgatgagagtatctgttgggatccacaaagaagacattgatgcagcaattgaaacatataatcttctttctgagaggtggtttactcatgcttcgcccactctcttcaatgctggtaccaaccgcccacaactttctagctgttttcttctgagtatgaaagatgacagcattgaaggcatttatgacactctaaagcaatgtgcattgatttctaagtctgctggaggaattggtgttgctgtgagttgtattcgggctactggcagctacattgctgggactaatggcaattccaatggccttgtaccgatgctgagagtatataacaacacagctcgatatgtggatcaaggtgggaacaagcgtcctggggcatttgctatttacctggagccttggcatttagacatctttgaattccttgatttaaagaagaacacaggaaaggaagagcagcgtgccagagatcttttctttgctctttggattccggatctcttcatgaaacgagtggagactaatcaggactggtctttgatgtgtccaaatgagtgtcctggtctggatgaggtttggggagaggaatttgagaaactatatgcaagttatgagaaacaaggtcgtgtccgcaaagttgtaaaagctcagcagctttggtatgccatcattgagtctcagacggaaacaggcaccccgtatatgctctacaaagattcctgtaatcgaaagagcaaccagcagaacctgggaaccatcaaatgcagcaacctgtgcacagaaatagtggagtacaccagcaaagatgaggttgctgtttgtaatttggcttccctggccctgaatatgtatgtcacatcagaacacacatacgactttaagaagttggctgaagtcactaaagtcgttgtccgaaacttgaataaaattattgatataaactactatcctgtaccagaggcatgcctatcaaataaacgccatcgccccattggaattggggtacaaggtctggcagatgcttttatcctgatgagatacccttttgagagtgcagaagcccagttactgaataagcagatctttgaaactatttattatggtgctctggaagccagctgtgaccttgccaaggagcagggcccatacgaaacctatgagggctctccagttagcaaaggaattcttcagtatgatatgtggaatgttactcctacagacctatgggactggaaggttctcaaggagaagattgcaaagtatggtataagaaacagtttacttattgccccgatgcctacagcttccactgctcagatcctggggaataatgagtccattgaaccttacaccagcaacatctatactcgcagagtcttgtcaggagaatttcagattgtaaatcctcacttattgaaagatcttaccgagcggggcctatggcatgaagagatgaaaaaccagattattgcatgcaatggctctattcagagcataccagaaattcctgatgacctgaagcaactttataaaactgtgtgggaaatctctcagaaaactgttctcaagatggcagctgagagaggtgctttcattgatcaaagccaatctttgaacatccacattgctgagcctaactatggcaaactcactagtatgcacttctacggctggaagcagggtttgaagactgggatgtattatttaaggacgagaccagcagctaatccaatccagttcactctaaataaggagaagctaaaagataaagaaaaggtatcaaaagaggaagaagagaaggagaggaacacagcagccatggtgtgctctttggagaatagagatgaatgtctgatgtgtggatcctgaggaaagacttggaagagaccagcatgtcttcagtagccaaactacttcttgagcatagataggtatagtgggtttgcttgaggtggtaaggctttgctggaccctgttgcaggcaaaaggagtaattgatttaaagtactgttaatgatgttaatgatttttttttaaactcatatattgggattttcaccaaaataatgcttttgaaaaaaagaaaaaaaaaacggatatattgagaatcaaagtagaagcttttaggaatgcaaaataagtcatcttgcatacagggagtggttaagtaaggtttcatcacccatttagcactgcttttctgaagacttcagttttgttaaggagatttagttttactgctttgactggtgggtcctctagatgcaaaactgagtgataactcatgagaagtactgataggacctttatctggatatggtcctataggttattctgaaataaagataaacatttctaagtgaaaaaaaaaaaaaaaa

SEQ ID NO: 1370 - DNA, 2500 bp; single-stranded, linear
  immediate source library: GENBANK
  immediate source clone: g36154
cccaggcgcagccaatgggaagggtcggaggcatggcacagccaatgggaagggccggggcaccaaagccaatgggaagggccgggagcgcgcggcgcgggagatttaaaggctgctggagtgaggggtcgcccgtgcaccctgtcccagccgtcctgtcctggctgctcgctctgcttcgctgcgcctccactatgctctccctccgtgtcccgctcgcgcccatcacggacccgcagcagctgcagctctcgccgctgaaggggctcagcttggtcgacaaggagaacacgccgccggccctgagcgggacccgcgtcctggccagcaagaccgcgaggaggatcttccaggagcccacggagccgaaaactaaagcagctgcccccggcgtggaggatgagccgctgctgagagaaaacccccgccgctttgtcatcttccccatcgagtaccatgatatctggcagatgtataagaaggcagaggcttccttttggaccgccgaggaggttgacctctccaaggacattcagcactgggaatccctgaaacccgaggagagatattttatatcccatgttctggctttctttgcagcaagcgatggcatagtaaatgaaaacttggtggagcgatttagccaagaagttcagattacagaagcccgctgtttctatggcttccaaattgccatggaaaacatacattctgaaatgtatagtcttcttattgacacttacataaaagatcccaaagaaagggaatttctcttcaatgccattgaaacgatgccttgtgtcaagaagaaggcagactgggccttgcgctggattggggacaaagaggctacctatggtgaacgtgttgtagcctttgctgcagtggaaggcattttcttttccggttcttttgcgtcgatattctggctcaagaaacgaggactgatgcctggcctcacattttctaatgaacttattagcagagatgagggtttacactgtgattttgcttgcctgatgttcaaacacctggtacacaaaccatcggaggagagagtaagagaaataattatcaatgctgttcggatagaacaggagttcctcactgaggccttgcctgtgaagctcattgggatgaattgcactctaatgaagcaatacattgagtttgtggcagacagacttatgctggaactgggttttagcaaggttttcagagtagagaacccatttgactttatggagaatatttcactggaaggaaagactaacttctttgagaagagagtaggcgagtatcagaggatgggagtgatgtcaagtccaacagagaattcttttaccttggatgctgacttctaaatgaactgaagatgtgcccttacttggctgattttttttttccatctcataagaaaaatcagctgaagtgttaccaactagccacaccatgaattgtccgtaatgttcattaacagcatctttaaaactgtgtagctacctcacaaccagtcctgtctgtttatagtgctggtagtatcaccttttgccagaaggcctggctggctgtgacttaccatagcagtgacaatggcagtcttggctttaaagtgaggggtgaccctttagtgagcttagcacagcgggattaaacagtcctttaaccagcacagccagttaaaagatgcagcctcactgcttcaacgcagattttaatgtttacttaaatataaacctggcactttacaaacaaataaacattgttttgtactcacggcggcgataatagcttgatttatttggtttctacaccaaatacattctcctgaccactaatgggagccaattcacaattcactaagtgactaaagtaagttaaacttgtgtagactaagcatgtaatttttaagttttattttaatgaattaaaatatttgttaaccaactttaaagtcagtcctgtgtatacctagatattagtcagttggtgccagatagaagacaggttgtgtttttatcctgtggcttgtgtagtgtcctgggattctctgccccctctgagtagagtgttgtgggataaaggaatctctcagggcaaggagcttcttaagttaaatcactagaaatttaggggtgatctgggccttcatatgtgtgagaagccgtttcattttatttctcactgtattttcctcaacgtctggttgatgagaaaaaattcttgaagagttttcatatgtgggagctaaggtagtattgtaaaatttcaagtcatccttaaacaaaatgatccacctaagatcttgcccctgttaagtggtgaaatcaactagaggtggttcctacaagttgttcattctagttttgtttggtgtaagtaggttgtgtgagttaattcatttatatttactatgtctgttaaatcagaaattttttattatctatgttcttctagattttacctgtagttcataaaaaaaaaaaaaaaaaaaaaaaaa

SEQ ID NO: 1371 - DNA, 1283 bp; single-stranded, linear
  immediate source library: GENBANK
  immediate source clone: g36326
tttcgcagccgctgccgcctcgccgctgctccttcgtaaggccacttccgcacaccgacaccaacatgaacggacagctcaacggcttccacgaggcgttcatcgaggagggcacattccttttcacctcagagtcggtcggggaaggccacccagataagatttgtgaccaaatcagtgatgctgtccttgatgcccaccttcagcaggatcctgatgccaaagtagcttgtgaaactgttgctaaaactggaatgatccttcttgctggggaaattacatccagagctgctgttgactaccagaaagtggttcgtgaagctgttaaacacattggatatgatgattcttccaaaggttttgactacaagacttgtaacgtgctggtagccttggagcaacagtcaccagatattgctcaaggtgttcatcttgacagaaatgaagaagacattggtgctggagaccagggcttaatgtttggctatgccactgatgaaactgaggagtgtatgcctttaaccattgtcttggcacacaagctaaatgccaaactggcagaactacgccgtaatggcactttgccttggttacgccctgattctaaaactcaagttactgtgcagtatatgcaggatcgaggtgctgtgcttcccatcagagtccacacaattgttatatctgttcagcatgatgaagaggtttgtcttgatgaaatgagggatgccctaaaggagaaagtcatcaaagcagttgtgcctgcgaaataccttgatgaggatacaatctaccacctacagccaagtggcagatttgttattggtgggcctcagggtgatgctggtttgactggacggaaaatcattgtggacacttatggcggttggggtgctcatggaggaggtgccttttcaggaaaggattataccaaggtcgaccgttcagctgcttatgctgctcgttgggtggcaaaatcccttgttaaaggaggtctgtgccggagggttcttgttcaggtctcttatgctattggagtttctcatccattatctatctccattttccattatggtacctctcagaagagtgagagagagctattagagattgtgaagaagaatttcgatctccgccctggggtcattgtcagggatctggatctgaagaagccaatttatcagaggactgcagcctatggccactttggtagggacagcttcccatgggaagtgcccaaaaagcttaaatattgaaagtgttagccttttttccccagacttgtt

SEQ ID NO: 1372 - DNA, 1364 bp; single-stranded, linear
  immediate source library: GENBANK
  immediate source clone: g36560
aaaatcaggaacttgtgctggccctgcaatgtcaagggagggggctcacccagggctcctgtagctcagggggcaggcctgagccctgcacccgccccacgaccgtccagcccctgacgggcaccccatcctgaggggctctgcattggcccccaccgaggcaggggatctgaccgactcggagcccggctggatgttacaggcgtgcaaaatggaagggtttcccctcgtcccccctccatcagaagacctggtgccctatgacacggatctataccaacgccaaacgcacgagtattacccctatctcagcagtgatggggagagccatagcgaccattactgggacttccacccccaccacgtgcacagcgagttcgagagcttcgccgagaacaacttcacggagctccagagcgtgcagcccccgcagctgcagcagctctaccgccacatggagctggagcagatgcacgtcctcgatacccccatggtgccaccccatcccagtcttggccaccaggtctcctacctgccccggatgtgcctccagtacccatccctgtccccagcccagcccagctcagatgaggaggagggcgagcggcagagccccccactggaggtgtctgacggcgaggcggatggcctggagcccgggcctgggctcctgcctggggagacaggcagcaagaagaagatccgcctgtaccagttcctgttggacctgctccgcagcggcgacatgaaggacagcatctggtgggtggacaaggacaagggcaccttccagttctcgtccaagcacaaggaggcgctggcgcaccgctggggcatccagaagggcaaccgcaagaagatgacctaccagaagatggcgcgcgcgctgcgcaactacggcaagacgggcgaggtcaagaaggtgaagaagaagctcacctaccagttcagcggcgaagtgctgggccgcgggggcctggccgagcggcgccacccgccccactgagcccgcagcccccgccggccccgccaggcctccccgctggccatagcattaagccctcgcccggcccggacacagggaggacgctcccggggcccagaggcaggactgtggcgggccgggctccgtcacccgcccctccccccactccaggccccctccacatcccgcttcgcctccctccaggactccaccccggctcccgacgccagctgggcgtcagacccaccggcaaccttgcagaggacgacccggggtactgccttgggagtctcaagtccgtatgtaaatcagatctcccctctcacccctcccacccattaacctcctcccaaaaaacaagtaaagttattctcaatcc

SEQ ID NO: 1373 - DNA, 1161 bp; single-stranded, linear
  immediate source library: GENBANK
  immediate source clone: g36612
ccacatggaagctggaggagcaaccgggagcgctgggctggggtgcaaattgcccagtgccttctgtttcccaggcagctctgtggccatggatatgttccagaaggtagagaagatcggagagggcacctatggggtggtgtacaaggccaagaacagggagacagggcagctggtggccctgaagaagatcagactggatttggagatggagggggtcccaagcactgccatcagggagatctcgctgctcaaggaactgaagcaccccaacatcgtccgactgctggacgtggtgcacaacgagaggaagctctatctggtgtttgagttcctcagccaggacctgaagaagtacatggactccaccccaggctcagagctccccctgcacctcatcaagagctacctcttccagctgctgcagggggtgagtttctgccactcacatcgggtcatccaccgagacctgaagccccagaacctgctcatcaatgagttgggtgccatcaagctggctgacttcggcctggctcgcgccttcggggtgcccctgcgcacctacacccatgaggtggtgacactgtggtatcgcgcccccgagattctcttgggcagcaagttctataccacagctgtggatatctggagcattggttgcatctttgcagagatggtgactcgaaaagccctgtttcctggtgactctgagattgaccagctctttcgtatctttcgtatgctggggacacccagcgaagacacatggcccggggtcacccagctgcctgactataagggcagcttccctaagtggaccaggaagggactggaagagattgtgcccaatctggagccagagggcagggacctgctcatgcaactcctgcagtatgaccccagccagcggatcacagccaagactgccctggcccacccgtacttctcatcccctgagccctccccagctgcccgccagtatgtgctgcagcgattccgccattgagaatgtcaaggccacactcagatcctttctcgagcagcagctgctgccccagctgcctcctacccattgccaagagaggatgcatctggggagagcaaagcactaaggaattcagcatcagcctgcagagggctgagtctgggttagtcctgccc

SEQ ID NO: 1374 - DNA, 1801 bp; single-stranded, linear
  immediate source library: GENBANK
  immediate source clone: g36632
gcaaggcatagagacaacatagagctaagtaaagccagtggaaatgaagagtcttccaatcctactgttgctgtgcgtggcagtttgctcagcctatccattggatggagctgcaaggggtgaggacaccagcatgaaccttgttcagaaatatctagaaaactactacgacctcaaaaaagatgtgaaacagtttgttaggagaaaggacagtggtcctgttgttaaaaaaatccgagaaatgcagaagttccttggattggaggtgacggggaagctggactccgacactctggaggtgatgcgcaagcccaggtgtggagttcctgatgttggtcacttcagaacctttcctggcatcccgaagtggaggaaaacccaccttacatacaggattgtgaattatacaccagatttgccaaaagatgctgttgattctgctgttgagaaagctctgaaagtctgggaagaggtgactccactcacattctccaggctgtatgaaggagaggctgatataatgatctcttttgcagttagagaacatggagacttttacccttttgatggacctggaaatgttttggcccatgcctatgcccctgggccagggattaatggagatgcccactttgatgatgatgaacaatggacaaaggatacaacagggaccaatttatttctcgttgctgctcatgaaattggccactccctgggtctctttcactcagccaacactgaagctttgatgtacccactctatcactcactcacagacctgactcggttccgcctgtctcaagatgatataaatggcattcagtccctctatggacctccccctgactcccctgagacccccctggtacccacggaacctgtccctccagaacctgggacgccagccaactgtgatcctgctttgtcctttgatgctgtcagcactctgaggggagaaatcctgatctttaaagacaggcacttttggcgcaaatccctcaggaagcttgaacctgaattgcatttgatctcttcattttggccatctcttccttcaggcgtggatgccgcatatgaagttactagcaaggacctcgttttcatttttaaaggaaatcaattctgggccatcagaggaaatgaggtacgagctggatacccaagaggcatccacaccctaggtttccctccaaccgtgaggaaaatcgatgcagccatttctgataaggaaaagaacaaaacatatttctttgtagaggacaaatactggagatttgatgagaagagaaattccatggagccaggctttcccaagcaaatagctgaagactttccagggattgactcaaagattgatgctgtttttgaagaatttgggttcttttatttctttactggatcttcacagttggagtttgacccaaatgcaaagaaagtgacacacactttgaagagtaacagctggcttaattgttgaaagagatatgtagaaggcacaatatgggcactttaaatgaagctaataattcttcacctaagtctctgtgaattgaaatgttcgttttctcctgcctgtgctgtgactcgagtcacactcaagggaacttgagcgtgaatctgtatcttgccggtcatttttatgttattacagggcattcaaatgggctgctgcttagcttgcaccttgtcacatagagtgatctttcccaagagaaggggaagcactcgtgtgcaacagacaagtgactgtatctgtgtagactatttgcttatttaataaagacgatttgtcagttgtttt

SEQ ID NO: 1375 - DNA, 1311 bp; single-stranded, linear
  immediate source library: GENBANK
  immediate source clone: g37039
gtaagtctgctggcctccgccatcttagtaaagtaacagtcccatgaaacaaagatgcagtcgggcactcactggagagttctgggcctctgcctcttatcagttggcgtttgggggcaagatggtaatgaagaaatgggtggtattacacagacaccatataaagtctccatctctggaaccacagtaatattgacatgccctcagtatcctggatctgaaatactatggcaacacaatgataaaaacataggcggtgatgaggatgataaaaacataggcagtgatgaggatcacctgtcactgaaggaattttcagaattggagcaaagtggttattatgtctgctaccccagaggaagcaaaccagaagatgcgaacttttatctctacctgagggcaagagtgtgtgagaactgcatggagatggatgtgatgtcggtggccacaattgtcatagtggacatctgcatcactgggggcttgctgctgctggtttactactggagcaagaatagaaaggccaaggccaagcctgtgacacgaggagcgggtgctggcggcaggcaaaggggacaaaacaaggagaggccaccacctgttcccaacccagactatgagcccatccggaaaggccagcgggacctgtattctggcctgaatcagagacgcatctgaccctctggagaacactgcctcccgctggcccaggtctcctctccagtccccctgcgactccctgtttcctgggctagtcttggaccccacgagagagaatcgttcctcagcctcatggtgaactcgcgccctccagcctgatcccccgctccctcctccctgccttctctgctggtacccagtcctaaaatattgctgcttcctcttcctttgaagcatcatcagtagtcacaccctcacagctggcctgccctcttgccaggatatttatttgtgctattcactcccttccctttggatgtaacttctccgttcagttccctccttttcttgcatgtaagttgtcccccatcccaaagtattccatctacttttctatcgccgtccccttttgcagccctctctggggatggactgggtaaatgttgacagaggccctgccccgttcacagatcctggccctgagccagccctgtgctcctccctcccccaacactccctaccaaccccctaatcccctactccctccaaccccccctcccactgtaggccactggatggtcatttggcatctccgtatatgtgctctggctcctcagctgagagagaaaaaaataaactgtatttggctgc

SEQ ID NO: 1376 - DNA, 2745 bp; single-stranded, linear
  immediate source library: GENBANK
  immediate source clone: g37092
acctccctccgcggagcagccagacagcgagggccccggccgggggcaggggggacgccccgtccggggcaccccccccggctctgagccgcccgcggggccggcctcggcccggagcggaggaaggagtcgccgaggagcagcctgaggccccagagtctgagacgagccgccgccgcccccgccactgcggggaggagggggaggaggagcgggaggagggacgagctggtcgggagaagaggaaaaaaacttttgagacttttccgttgccgctgggagccggaggcgcggggacctcttggcgcgacgctgccccgcgaggaggcaggacttggggaccccagaccgcctccctttgccgccggggacgcttgctccctccctgccccctacacggcgtccctcaggcgcccccattccggaccagccctcgggagtcgccgacccggcctcccgcaaagacttttccccagacctcgggcgcaccccctgcacgccgccttcatccccggcctgtctcctgagcccccgcgcatcctagaccctttctcctccaggagacggatctctctccgacctgccacagatcccctattcaagaccacccaccttctggtaccagatcgcgcccatctaggttatttccgtgggatactgagacacccccggtccaagcctcccctccaccactgcgcccttctccctgaggagcctcagctttccctcgaggccctcctaccttttgccgggagacccccagcccctgcaggggcggggcctccccaccacaccagccctgttcgcgctctcggcagtgccggggggcgccgcctcccccatgccgccctccgggctgcggctgctgccgctgctgctaccgctgctgtggctactggtgctgacgcctggcccgccggccgcgggactatccacctgcaagactatcgacatggagctggtgaagcggaagcgcatcgaggccatccgcggccagatcctgtccaagctgcggctcgccagccccccgagccagggggaggtgccgcccggcccgctgcccgaggccgtgctcgccctgtacaacagcacccgcgaccgggtggccggggagagtgcagaaccggagcccgagcctgaggccgactactacgccaaggaggtcacccgcgtgctaatggtggaaacccacaacgaaatctatgacaagttcaagcagagtacacacagcatatatatgttcttcaacacatcagagctccgagaagcggtacctgaacccgtgttgctctcccgggcagagctgcgtctgctgaggaggctcaagttaaaagtggagcagcacgtggagctgtaccagaaatacagcaacaattcctggcgatacctcagcaaccggctgctggcacccagcgactcgccagagtggttatcttttgatgtcaccggagttgtgcggcagtggttgagccgtggaggggaaattgagggctttcgccttagcgcccactgctcctgtgacagcagggataacacactgcaagtggacatcaacgggttcactaccggccgccgaggtgacctggccaccattcatggcatgaaccggcctttcctgcttctcatggccaccccgctggagagggcccagcatctgcaaagctcccggcaccgccgagccctggacaccaactattgcttcagctccacggagaagaactgctgcgtgcggcagctgtacattgacttccgcaaggacctcggctggaagtggatccacgagcccaagggctaccatgccaacttctgcctcgggccctgcccctacatttggagcctggacacgcagtacagcaaggtcctggccctgtacaaccagcataacccgggcgcctcggcggcgccgtgctgcgtgccgcaggcgctggagccgctgcccatcgtgtactacgtgggccgcaagcccaaggtggagcagctgtccaacatgatcgtgcgctcctgcaagtgcagctgaggtcccgccccgccccgccccgccccggcaggcccggccccaccccgccccgcccccgctgccttgcccatgggggctgtatttaaggacaccgtgccccaagcccacctggggccccattaaagatggagagaggactgcggatctctgtgtcattgggcgcctgcctggggtctccatccctgacgttcccccactcccactccctctctctccctctctgcctcctcctgcctgtctgcactattcctttgcccggcatcaaggcacaggggaccagtggggaacactactgtagttagatctatttattgagcaccttgggcactgttgaagtgccttacattaatgaactcattcagtcaccatagcaacactctgagatggcagggactctgataacacccattttaaaggttgaggaaacaagcccagagaggttaagggaggagttcctgcccaccaggaacctgctttagtgggggatagtgaagaagacaataaaagatagtagttcaggccaggcggggtgctcacgcctgtaatcctagcacttttgggaggcagagatgggaggatacttgaatccaggcatttgagaccagcctgggtaacatagtgagaccctatctctacaaaacacttttaaaaaatgtacacctgtggtcccagctactctggaggctaaggtgggaggatcacttgatcctgggaggtcaaggctgcag

SEQ ID NO: 1377 - DNA, 874 bp; single-stranded, linear
  immediate source library: GENBANK
  immediate source clone: g37408
gggcgggaagacgtgcagcctgggccgtggctgctcactgcgttcggacccagacccgctgcaggcagcagcagcccccgcccgcgcacgagcatggagctctggggggcctacctcctcctctgcctcttctccctcctgacccaggtcaccaccgagccaccaacccagaagcccaagaagattgtaaatgccaagaaagatgttgtgaacacaaagatgtttgaggagctcaagagccgtctggacaccctggcccaggaggtggccctgctgaaggagcagcaggccctgcagacggtctgcctgaaggggaccaaggtgcacatgaaatgctttctggccttcacccagacgaagaccttccacgaggccagcgaggactgcatctcgcgcgggggcaccctgagcacccctcagactggctcggagaacgacgccctgtatgagtacctgcgccagagcgtgggcaacgaggccgagatctggctgggcctcaacgacatggcggccgagggcacctgggtggacatgaccggcgcccgcatcgcctacaagaactgggagactgagatcaccgcgcaacccgatggcggcaagaccgagaactgcgcggtcctgtcaggcgcggccaacggcaagtggttcgacaagcgctgccgcgatcagctgccctacatctgccagttcgggatcgtgtagccggcggggcgggggccgtggggggcctggaggagggcaggagccgcgggaggccgggaggagggtggggaccttgcagcccccatcctctccgtgcgcttggagcctctttttgcaaataaagttggtgcacgttcgcggagaggaaaaaaaaaaaaaaaaaaaaaaaaaa

SEQ ID NO: 1378 - DNA, 4176 bp; single-stranded, linear
  immediate source library: GENBANK
  immediate source clone: g37503
gacgcgggcgcggaaggagcgcggccggaggtcctcaggaagaagccgcggggactggctgcgcttgacaggctgcacttggatgggagcacctggtgcctcgggactgctccgatgcccgggtctgtgctgaatgtgtaatatgcggaactatattgaaacattacaaccatcttttgatggcaacaccctgaggacctcccttttccagatggggaaactgaggcccagaattgctaagtggcttgcttgagttgacacagggagctccaggactcaccctcagctgagccacctgccgggagcatgcctctgcgccactgggggatggccaggggcagtaagcccgttggggatggagcccagcccatggctgccatgggaggcctgaaggtgcttctgcactgggctggtccaggcggcggggagccctgggtcactttcagtgagtcatcgctgacagctgaggaagtctgcatccacattgcacataaagttggtatcactcctccttgcttcaatctctttgccctcttcgatgctcaggcccaagtctggttgcccccaaaccacatcctagagatccccagagatgcaagcctgatgctatatttccgcataaggttttatttccggaactggcatggcatgaatcctcgggaaccggctgtgtaccgttgtgggcccccaggaaccgaggcatcctcagatcagacagcacaggggatgcaactcctggacccagcctcatttgagtacctctttgagcagggcaagcatgagtttgtgaatgacgtggcatcactgtgggagctgtcgaccgaggaggagatccaccactttaagaatgagagcctgggcatggcctttctgcacctctgtcacctcgctctccgccatggcatccccctggaggaggtggccaagaagaccagcttcaaggactgcatcccgcgctccttccgccggcatatccggcagcacagcgccctgacccggctgcgccttcggaacgtcttccgcaggttcctgcgggacttccagccgggccgactctcccagcagatggtcatggtcaaatacctagccacactcgagcggctggcaccccgcttcggcacagagcgtgtgcccgtgtgccacctgaggctgctggcccaggccgagggggagccctgctacatccgggacagtggggtggcccctacagaccctggccctgagtctgctgctgggcccccaacccacgaggtgctggtgacaggcactggtggcatccagtggtggccagtagaggaggaggtgaacaaggaggagggttctagtggcagcagtggcaggaacccccaagccagcctgtttgggaagaaggccaaggctcacaaggcattcggccagccggcagacaggccgcgggagccactgtgggcctacttctgtgacttccgggacatcacccacgtggtgctgaaagagcactgtgtcagcatccaccggcaggacaacaagtgcctggagctgagcttgccttcccgggctgcggcgctgtccttcgtgtcgctggtggacggctatttccgcctgacggccgactccagccactacctgtgccacgaggtggctcccccacggctggtgatgagcatccgggatgggatccacggacccctgctggagccatttgtgcaggccaagctgcggcccgaggacggcctgtacctcattcactggagcaccagccacccctaccgcctgatcctcacagtggcccagcgtagccaggcaccagacggcatgcagagcttgcggctccgaaagttccccattgagcagcaggacggggccttcgtgctggagggctggggccggtccttccccagcgttcgggaacttggggctgccttgcagggctgcttgctgagggccggggatgactgcttctctctgcgtcgctgttgcctgccccaaccaggagaaacctccaatctcatcatcatgcggggggctcgggccagccccaggacactcaacctcagccagctcagcttccaccgggttgaccagaaggagatcacccagctgtcccacttgggccagggcacaaggaccaacgtgtatgagggccgcctgcgagtggagggcagcggggaccctgaggagggcaagatggatgacgaggaccccctcgtgcctggcagggaccgtgggcaggagctacgagtggtgctcaaagtgctggaccctagtcaccatgacatcgccctggccttctacgagacagccagcctcatgagccaggtctcccacacgcacctggccttcgtgcatggcgtctgtgtgcgcggccctgaaaatagcatggtgacagagtacgtggagcacggacccctggatgtgtggctgcggagggagcggggccatgtgcccatggcttggaagatggtggtggcccagcagctggccagcgccctcagctacctggagaacaagaacctggttcatggtaatgtgtgtggccggaacatcctgctggcccggctggggttggcagagggcaccagccccttcatcaagctgagtgatcctggcgtgggcctgggcgccctctccagggaggagcgggtggagaggatcccctggctggcccccgaatgcctaccaggtggggccaacagcctaagcaccgccatggacaagtgggggtttggcgccaccctcctggagatctgctttgacggagaggcccctctgcagagccgcagtccctccgagaaggagcatttctaccagaggcagcaccggctgcccgagccctcctgcccacagctggccacactcaccagccagtgtctgacctatgagccaacccagaggccatcattccgcaccatcctgcgtgacctcacccgcgtgcagccccacaatcttgctgacgtcttgactgtgaaccgggactcaccggccgtcggacctactactttccacaagcgctatttgaaaaagatccgagatctgggcgagggtcacttcggcaaggtcagcttgtactgctacgatccgaccaacgacggcactggcgagatggtggcggtgaaagccctcaaggcagactgcggcccccagcaccgctcgggctggaagcaggagattgacattctgcgcacgctctaccacgagcacatcatcaagtacaagggctgctgcgaggaccaaggcgagaagtcgctgcagctggtcatggagtacgtgcccctgggcagcctccgagactacctgccccggcacagcatcgggctggcccagctgctgctcttcgcccagcagatctgcgagggcatggcctatctgcacgcgcacgactacatccaccgagacctagccgcgcgcaacgtgctgctggacaacgacaggctggtcaagatcggggactttggcctagccaaggccgtgcccgaaggccacgagtactaccgcgtgcgcgaggatggggacagccccgtgttctggtatgccccagagtgcctgaaggagtataagttctactatgcgtcagatgtctggtccttcggggtgaccctgtatgagctgctgacgcactgtgactccagccagagcccccccacgaaattccttgagctcataggcattgctcagggtcagatgacagttctgagactcactgagttgctggaacgaggggagaggctgccacggcccgacaaatgtccctgtgaggtctatcatctcatgaagaactgctgggagacagaggcgtcctttcgcccaaccttcgagaacctcatacccattctgaagacagtccatgagaagtaccaaggccaggccccttcagtgttcagcgtgtgctgaggcacaatggcagccctgcctgggaggactggaccaggcagtggctgcagagggagcctcctgctccctgctccaggatgaaaccaagagggggatgtcagcctcacccacaccgtgtgccttactcctgtctagagaccccacctctgtgaacttatttttctttcttggccgtgagcctaaccatgatcttgagggacccaacatttgtaggggcactaatccagcccttaaatcccccagcttccaaacttgaggcccaccatctccaccatctggtaataaactcatgttttctctgctggg

SEQ ID NO: 1379 - DNA, 4267 bp; single-stranded, linear
  immediate source library: GENBANK
  immediate source clone: g37983
cttcctctgccaccatcggggaactgggctgtgaatgaggggctctccatttttgctattctggtttggctggggttgaacgtcttcctctttgtctggtattaccgggtttatgatattccacctaagttcttttacacaagaaaacttcttgggtcagcactggcactggccagggcccctgcagcctgcctgaatttcaactgcatgctgattctcttgccagtctgtcgaaatctgctgtccttcctcaggggttccagtgcgtgctgctcaacaagagttcgaagacaactggacaggaatctcacctttcataaaatggtggcatggatgattgcacttcactctgcgattcacaccattgcacatctatttaatgtggaatggtgtgtgaatgcccgagtcaataattctgatccttattcagtagcactctctgaacttggagacaggcaaaatgaaagttatctcaattttgctcgaaagagaataaagaaccctgaaggaggcctgtacctggctgtgaccctgttggcaggcatcactggagttgtcatcacgctgtgcctcatattaattatcacttcctccaccaaaaccatccggaggtcttactttgaagtcttttggtacacacatcatctctttgtgatcttcttcattggccttgccatccatggagctgaacgaattgtacgtgggcagaccgcagagagtttggctgtgcataatataacagtttgtgaacaaaaaatctcagaatggggaaaaataaaggaatgcccaatccctcagtttgctggaaaccctcctatgacttggaaatggatagtgggtcccatgtttctgtatctctgtgagaggttggtgcggttttggcgatctcaacagaaggtggtcatcaccaaggtggtcactcaccctttcaaaaccatcgagctacagatgaagaagaaggggttcaaaatggaagtgggacaatacatttttgtcaagtgcccaaaggtgtccaagctggagtggcacccttttacactgacatccgcccctgaggaagacttctttagtatccatatccgcatcgttggggactggacagaggggctgttcaatgcttgtggctgtgataagcaggagtttcaagatgcgtggaaactacctaagatagcggttgatgggccctttggcactgccagtgaagatgtgttcagctatgaggtggtgatgttagtgggagcagggattggggtcacacccttcgcatccattctcaagtcagtctggtacaaatattgcaataacgccaccaatctgaagctcaaaaagatctacttctactggctgtgccgggacacacatgcctttgagtggtttgcagatctgctgcaactgctggagagccagatgcaggaaaggaacaatgccggcttcctcagctacaacatctacctcactggctgggatgagtctcaggccaatcactttgctgtgcaccatgatgaggagaaagatgtgatcacaggcctgaaacaaaagactttgtatggacggcccaactgggataatgaattcaagacaattgcaagtcaacaccctaataccagaataggagttttcctctgtggacctgaagccttggctgaaaccctgagtaaacaaagcatctccaactctgagtctggccctcggggagtgcatttcattttcaacaaggaaaacttctaacttgtctcttccatgaggaaataaatgtgggttgtgctgccaaatgctcaaataatgctaattgataatataaataccccctgcttaaaaatggacaaaaagaaactataatgtaatggttttcccttaaaggaatgtcaaagattgtttgatagtgataagttacatttatgtggagctctatggttttgagagcacttttacaaacattatttcatttttttcctctcagtaatgtcagtggaagttagggaaaagattcttggactcaattttagaatcaaaagggaaaggatcaaaaggttcagtaacttccctaagattatgaaactgtgaccagatctagcccatcttactccaggtttgatactctttccacaatactgagctgcctcagaatcctcaaaatcagtttttatattccccaaaagaagaaggaaaccaaggagtagctatatatttctactttgtgtcatttttgccatcattattatcatactgaaggaaattttccagatcattaggacataatacatgttgagagtgtctcaacacttattagtgacagtattgacatctgagcatactccagtttactaatacagcagggtaactgggccagatgttctttctacagaagaatattggattgattggagttaatgtaatactcatcatttaccactgtgcttggcagagagcggatactcaagtaagttttgttaaatgaatgaatgaatttagaaccacacaatgccaagatagaattaatttaaagccttaaacaaaatttatctaaagaaataacttctattactgtcatagaccaaaggaatctgattctccctagggtcaagaacaggctaaggatactaaccaataggattgcctgaagggttctgcacattcttatttgaagcatgaaaaaagagggttggaggtggagaattaacctcctgccatgactctggctcatctagtcctgctccttgtgctataaaataaatgcagactaatttcctgcccaaagtggtcttctccagctagcccttatgaatattgaacttaggaattgtgacaaatatgtatctgatatggtcatttgttttaaataacacccaccccttattttccgtaaatacacacacaaaatggatcgcatctgtgtgactaatggtttatttgtattatatcatcatcatcatcctaaaattaacaacccagaaacaaaaatctctatacagagatcaaattcacactcaatagtatgttctgaatatatgttcaagagagagtctctaaatcactgttagtgtggccaagagcagggttttctttttgttcttagaactgctcccatttctgggaactaaaaccagttttatttgccccaccccttggagccacaaatgtttagaactcttcaacttcggtaatgaggaagaaggagaaagagctgggggaagggcagaagactggtttaggaggaaaaggaaataaggagaaaagagaatgggagagtgagagaaaataaaaaaggcaaaagggagagagaggggaagggggtctcatattggtcattccctgccccagatttcttaaagtttgatatgtatagaatataattgaaggaggtatacacatactgatgttgttttgattatctatggtattgaatcttttaaaatctggtcacaaattttgatgctgagggggattattcaagggactaggatgaactaaataagaactcagttgttctttgtcatactactattcctttcgtctcccagaatcctcagggcactgagggtaggtctgacaaataaggcctgctgtgcgaatatagcctttctgaaatgtaccaggatggtttctgcttagagacacttaggtccagcctgttcacactgcacctcaggtatcaattcatctattcaacagatatttattgtgttattactatgagtcaggctctgtttattgtttcaattctttacaccaaagtatgaactggagagggtacctcagttataaggagtctgagaatattggccctttctaacctatgtgcataattaaaaccagcttcatttgttgctccgagagtgtttctccaaggttttctatcttcaaaaccaactaagttatgaaagtagagagatctgccctgtgttatccagttatgagataaaaaatgaatataagagtgcttgtcattataaaagtttcctttttatctctcaagccaccagctgccagccaccacgagccagctgccagcctagctttttttttttttttttttttagcacttagtatttagcatttattaacaggtactctaagaatgatgaagcattgtttttaatcttaagactatgaaggtttttcttagttcttctgcttttgcaattgtgtttgtgaaatttgaatacttgcaggctttgtatgtgaataattctagcgggggacctgggagataattctacggggaattcttaaaactgtgctcaactattaaaatgaatgagctttc

SEQ ID NO: 1380 - DNA, 1855 bp; single-stranded, linear
  immediate source library: GENBANK
  immediate source clone: g38271
gaattcggggcaagggacaaaaatacagcaacaagagaaaaaactcacagaggcagaaagagacggggacaaaaagagagaaacacatcaaagagatgtggagagagatagaaacagagtcaggaagactaaagagaggctgagagagatgagttagagatacgcggttggatgtgtagaggacagagaaaagcaaactgggccagatagtgtcaaagacctttaggccaacggagggcagccagggagatgggcgtatacacagcaagctacagcctcccctgaccctccccttccttccctactgtggacgcaggagaaatccaacgcacacagtgaattcagccaccagaacctcaacctcaacacgctctcgctcttctttgctggcactgagaccaccagcaccactctccgctacggcttcctgctcatgctcaaataccctcatgttgcagagagagtctacagggagattgaacaggtgattggcccacatcgccctccagagcttcatgaccgagccaaaatgccatacacagaggcagtcatctatgagattcagagattttccgaccttctccccatgggtgtgccccacattgtcacccaacacaccagcttccgagggtacatcatccccaagggaagcggatttgtcttggtgaaggcatcgcccgagcggaattgttcctcttcttcaccaccatcctccagaacttctccatggccagccccgtggccccagaagacatcgatctgacaccccaggagtgtggtgtgggcaaaatacccccaacataccagatccgcttcctgccccgctgaaggggctgagggaagggggtcaaaggattccagggtcattcagtgtccccgcctctgtagacaatggctctgactccccgcaacttcctgcctctgagagacctgctacaagccagcttccttcccctccatggcaccagttgtctgaggtcacattgcaagtgagtgcaggagtgagattatcgaaaattataatatacaaaatcatatatatatatatgttcttgttttttgagacagagtctcacactgttgcccaggctggagtgcagtggcgtgatcttggctcactgcaacctccacccccggggatcaagcaactctcctgcctcagcctccctagtagctgggattacaggcatgcactaccacgcttggctaatttttgtatttttagtagagatggggtttcactgtgtaggccaggctggtctcgaactcctgaactcaagtgattcacccaccttagcctcccaaagtgctgggattagaggcgtgagtcaccgtgcccagccatgtatatatataattttaaaaattaagctgaaattcacataacataaaattagccgttttaaagtgtaaaatttagtggcgtgtggttcattcacaaagctgtacaaccaccaccatctagttccaaacattttctttttttctgagatggagtctcactctgtcacccaggttcgagttcagtggtgccatctctgtccactgcaacctccacatcctgggttcaagtgattctcctgcctcagcctctggaggagctggtatcacaggcgtcccccaccacgcctggctaaattttgtatttttaggtgttcttgaactcctgatgtcaggtgattctcctagctccaaatgttttcattatctctcccccaacaaaacccatacctatcaagctgtcactccccataccccattctctttttcatctcggcccctgtcaatctggtttttgtcactatggacttaccaattctgaatatttcccataaacagaatcatacaggaattc

SEQ ID NO: 1381 - DNA, 991 bp; single-stranded, linear
  immediate source library: GENBANK
  immediate source clone: g38273
gaattccggaatttccccagtgccccggaggctcgatgactcctttctcatccgcatgcaggaggaggagaagaaccccaacacggagttctacttgaaaaacctggtgatgaccacgttgaacctcttcattgggggcaccgagaccgtcagcaccaccctgcgctatggcttcttgctgctcatgaagcacccagaggtggaggccaaggtccatgaggagattgacagagtgatcggcaagaaccggcagcccaagtttgaggaccgggccaagatgccctacatggaggcagtgatccacgagatccaaagatttggagacgtgatccccatgagtttggcccgcagagtcaaaaaggacaccaagtttcgggatttcttcctccttaagggcaccgaagtgtaccctatgctgggctctgtgctgagagaccccagtttcttctccaacccccaggacttcaatccccagcacttcctgaatgagaaggggcagtttaagaagagtgatgcttttgtgcccttttccatcggaaagcggaactgtttcggagaaggcctggccagaatggagctctttctcttcttcaccaccgtcatgcagaacttccgcctcaagtcctcccagtcacctaaggacattgacgtgtcccccaaacacgtgggctttgccacgatcccacgaaactacaccatgagcttcctgccccgctgagcgagggctgtgccggtgcaggtctggtgggcggggccagggaaagggcagggccaagaccgggcttgggagaggggcgcagctaagactgggggcaggatggcggaaaggaaggggcgtggtggctagagggaagagaagaaacagaagcggctcagttcaccttgataaggtgcttccgagctgggatgagaggaaggaaacccttacattatgctatgaagagtagtaataatagcagctcttatttcctgaaaaaaaaaaaaggaattc

SEQ ID NO: 1382 - DNA, 585 bp; single-stranded, linear
  immediate source library: GENBANK
  immediate source clone: g38329
cctcagcctctgcctcccagcctctttctgagggaaaggacaagatgaagtggaaggcgcttttcaccgcggccatcctgcaggcacagttgccgattacagaggcacagagctttggcctgctggatcccaaactctgctacctgctggatggaatcctcttcatctatggtgtcattctcactgccttgttcctgagagtgaagttcagcaggagcgcagacgcccccgcgtaccagcagggccagaaccagctctataacgagctcaatctaggacgaagagaggagtacgatgttttggacaagagacgtggccgggaccctgagatggggggaaagccgagaaggaagaaccctcaggaaggcctgtacaatgaactgcagaaagataagatggcggaggcctacagtgagattgggatgaaaggcgagcgccggaggggcaaggggcacgatggcctttaccagggtctcagtacagccaccaaggacacctacgacgcccttcacatgcaggccctgccccctcgctaacagccaggggatttcaccactcaaaggccagacctgcagacgcccagat

SEQ ID NO: 1383 - DNA, 329 bp; single-stranded, linear
  immediate source library: GENBANK
  immediate source clone: g38405_1
tttggagtgcatattataagggccccccgtcctggttcgacccctggggccagggaaccctggtcaccgtctcctcagcctccaccaagggcccatcggtcttccccctggcgccctgctccaggagcacctccgagagcacagcggccctgggctgcctggtcaaggactacttccccgaaccggtgacggtgtcgtggaactcaggcgccctgaccagcggcgtgcacaccttcccggctgtcctacagtcctcaggactctactccctcagcagcgtggtgaccgtgccctccagcagcttgggcacgaagacctacacctgcaac

SEQ ID NO: 1384 - DNA, 540 bp; single-stranded, linear
  immediate source library: GENBANK
  immediate source clone: g38405_2
actttcagcgccgtgggtgaggccagcatctgcgaggatgactggaattccggggagaggttcacgtgcaccgtgacccacacagacctgccctcgccactgaagcagaccatctcccggcccaagggggtggccctgcacaggcccgatgtctacttgctgccaccagcccgggagcagctgaacctgcgggagtcggccaccatcacgtgcctggtgacgggcttctctcccgcggacgtcttcgtgcagtggatgcagagggggcagcccttgtccccggagaagtatgtgaccagcgccccaatgcctgagccccaggccccaggccggtacttcgcccacagcatcctgaccgtgtccgaagaggaatggaacacgggggagacctacacctgcgtggtggcccatgaggccctgcccaacagggtcaccgagaggaccgtggacaagtccaccggtaaacccaccctgtacaacgtgtccctggtcatgtccgacacagctggcacctgctactgaccctgctggcctgcccac

SEQ ID NO: 1385 - DNA, 2073 bp; single-stranded, linear
  immediate source library: GENBANK
  immediate source clone: g385858
tggttgtgtgggacaaggtgctcctgacagaaggatgccacagctgagcctgtcctcgctgggcctttggccaatggcagcatccccgtggctgctcctgctgctggttggggcctcctggctcctggcccgcatcctggcctggacctataccttctatgacaactgctgccgcctccggtgtttcccgcaacccccgaaacggaattggttcttgggtcacctgggcctgattcacagctcggaggaaggtctcctatacacacaaagcctggcatgcaccttcggtgatatgtgctgctggtgggtggggccctggcacgcaatcgtccgcatcttccaccccacctacatcaagcctgtgctctttgctccagctgccattgtaccaaaggacaaggtcttctacagcttcctgaagccctggctgggggatgggctcctgctgagtgctggtgaaaagtggagccgccaccgtcggatgctgacgcctgccttccatttcaacatcctgaagccctatatgaagattttcaatgagagtgtgaacatcatgcatgccaagtggcagctcctggcctcagagggtagtgcccgtctggacatgtttgagcacatcagcctcatgaccttggacagtctgcagaaatgtgtcttcagctttgacagccattgccaggagaagcccagtgaatatattgccgccatcttggagctcagtgcccttgtgacaaaaagacaccagcagatcctcctgtacatagacttcctgtattatctcacccctgatgggcagcgtttccgcagggcctgccgcctggtgcacgacttcacagatgacgtcatccaggagcggcgccgcaccctccctagccagggtgttgatgacttcctccaagccaaggccaaatccaagactttggacttcattgatgtactcctgctgagcaaggatgaagatgggaagaagttgtccgatgaggacataagagcagaagctgacacctttatgtttgagggccatgacaccacagccagtggtctctcctgggtcctgtaccaccttgcaaagcacccggaataccaggagcgctgtcggcaggaggtacaagagcttctgaaggaccgtgagcctaaagagattgaatgggacgacctggcccagctgcccttcctgaccatgtgcattaaggagagcctgaggctgcatcccccagtccctgccgtctctcgctgctgcacccaagacattgtgctcccagacggccgggtcatccccaaaggcattatctgcctcatcagtgtttttggaacccatcacaacccagccgtgtggccggaccctgaggtctatgacccctttcgctttgacccaaagaacatcaaggagaggtcacctctggcttttattcccttctcagcagggcccaggaactgcatcgggcaggcgttcgcgatggcggagatgaaggtggtcctggggctcacgctgctggccttccgcgtcctgcctgaccacaccgagccccgcaggaagccggagctggtcctgcgcgcagagggcggactttggctgcgggtggagcccctgagctgagttctgcagagacccactctgaccccactaaaatgacccctgattcatcaaaagtgaggcctagaattaccctaagaccctgttccacagtcctgtattccatcctagatatctactcaaaataattgagacaagtgttcaaacagaaagacgcttgtgcggaatgttcatggcagccctattcacagtagcccaaacgatgaaaacaccccaagctatatattaccagataaaaggataaacacaatatggtccatccatacactggagtattacacagccataaaaaggaatgaagcagtgatccccactacactgtggatgaaccttgaatgcatgatactgaatgaaagacatcagatgcaaaaggtcacatagtgtactgtccttttatatggaaatttccaagaaacagggccaatctgaagagatgtatagtggattggtgcgtttcagcagctggggggggggggggg

SEQ ID NO: 1386 - DNA, 5828 bp; single-stranded, linear
  immediate source library: GENBANK
  immediate source clone: g386256
cggcggcgcggtcggagggggccggcgcgcagagccagacgccgccgcttgttttggttggggctctcggcaactctccgaggaggaggaggaggagggaggaggggagaagtaactgcagcggcagcgccctcccgaggaacaggcgtcttccccgaacccttcccaaacctcccccatcccctctcgcccttgtcccctcccctcctccccagccgcctggagcgaggggcagggatgagtctgtccctccggccggtccccagctgcagtggctgcccggtatcgtttcgcatggaaaagccactttctccacccgccgagatgggcccggatggggctgcagaggacgcgcccgcgggcggcggcagcagcagcagcagcagcagcagcaacagcaacagccgcagcgccgcggtctctgcgactgagctggtatttgggcggctggtggcggctgggacggttggggggtgggaggaggcgaaggaggagggagaaccccgtgcaacgttgggacttggcaacccgcctccccctgcccaaggatatttaatttgcctcgggaatcgctgcttccagaggggaactcaggagggaaggcgcgcgcgcgcgcgcgctcctggaggggcaccgcagggacccccgactgtcgcctccctgtgccggactccagccggggcgacgagagatgcatcttcgctccttcctggtggcggcggcggctgagaggagacttggctctcggaggatcggggctgccctcaccccggacgcactgcctccccgccggcgtgaagcgcccgaaaactccggtcgggctctctcctgggctcagcagctgcgtcctccttcagctgcccctccccggcgcggggggcggcgtggatttcagagtcggggtttctgctgcctccagccctgtttgcatgtgccgggccgcggcgaggagcctccgccccccacccggttgtttttcggagcctccctctgctcagcgttggtggtggcggtggcagcatggcgagccctccggagagcgatggcttctcggacgtgcgcaaggtgggctacctgcgcaaacccaagagcatgcacaaacgcttcttcgtactgcgcgcggccagcgaggctgggggcccggcgcgcctcgagtactacgagaacgagaagaagtggcggcacaagtcgagcgcccccaaacgctcgatcccccttgagagctgcttcaacatcaacaagcgggctgactccaagaacaagcacctggtggctctctacacccgggacgagcactttgccatcgcggcggacagcgaggccgagcaagacagctggtaccaggctctcctacagctgcacaaccgtgctaagggccaccacgacggagctgcggccctcggggcgggaggtggtgggggcagctgcagcggcagctccggccttggtgaggctggggaggacttgagctacggtgacgtgcccccaggacccgcattcaaagaggtctggcaagtgatcctgaagcccaagggcctgggtcagacaaagaacctgattggtatctaccgcctttgcctgaccagcaagaccatcagcttcgtgaagctgaactcggaggcagcggccgtggtgctgcagctgatgaacatcaggcgctgtggccactcggaaaacttcttcttcatcgaggtgggccgttctgccgtgacggggcccggggagttctggatgcaggtggatgactctgtggtggcccagaacatgcacgagaccatcctggaggccatgcgggccatgagtgatgagttccgccctcgcagcaagagccagtcctcgtccaactgctctaaccccatcagcgtccccctgcgccggcaccatctcaacaatcccccgcccagccaggtggggctgacccgccgatcacgcactgagagcatcaccgccacctccccggccagcatggtgggcgggaagccaggctccttccgtgtccgcgcctccagtgacggcgaaggcaccatgtcccgcccagcctcggtggacggcagccctgtgagtcccagcaccaacagaacccacgcccaccggcatcggggcagcgcccggctgcaccccccgctcaaccacagccgctccatccccatgccggcttcccgctgctcgccttcggccaccagcccggtcagtctgtcgtccagtagcaccagtggccatggctccacctcggattgtctcttcccacggcgatctagtgcttcggtgtctggttcccccagcgatggcggtttcatctcctcggatgagtatggctccagtccctgcgatttccggagttccttccgcagtgtcactccggattccctgggccacaccccaccagcccgcggtgaggaggagctaagcaactatatctgcatgggtggcaaggggccctccaccctgaccgcccccaacggtcactacattttgtctcggggtggcaatggccaccgctgcaccccaggaacaggcttgggcacgagtccagccttggctggggatgaagcagccagtgctgcagatctggataatcggttccgaaagagaactcactcggcaggcacatcccctaccattacccaccagaagaccccgtcccagtcctcagtggcttccattgaggagtacacagagatgatgcctgcctacccaccaggaggtggcagtggaggccgactgccgggacacaggcactccgccttcgtgcccacccgctcctacccagaggagggtctggaaatgcaccccttggagcgtcggggggggcaccaccgcccagacagctccaccctccacacggatgatggctacatgcccatgtccccaggggtggccccagtgcccagtggccgaaagggcagtggagactatatgcccatgagccccaagagcgtatctgccccacagcagatcatcaatcccatcagacgccatccccagagagtggaccccaatggctacatgatgatgtcccccagcggtggctgctctcctgacattggaggtggccccagcagcagcagcagcagcagcaacgccgtcccttccgggaccagctatggaaagctgtggacaaacggggtagggggccaccactctcatgtcttgcctcaccccaaacccccagtggagagcagcggtggtaagctcttaccttgcacaggtgactacatgaacatgtcaccagtgggggactccaacaccagcagcccctccgactgctactacggccctgaggacccccagcacaagccagtcctctcctactactcattgccaagatcctttaagcacacccagcgccccggggagccggaggagggtgcccggcatcagcacctccgcctttccactagctctggtcgccttctctatgctgcaacagcagatgattcttcctcttccaccagcagcgacagcctgggtgggggatactgcggggctaggctggagcccagccttccacatccccaccatcaggttctgcagccccatctgcctcgaaaggtggacacagctgctcagaccaatagccgcctggcccggcccacgaggctgtccctgggggatcccaaggccagcaccttacctcgggcccgagagcagcagcagcagcagcagcccttgctgcaccctccagagcccaagagcccgggggaatatgtcaatattgaatttgggagtgatcagtctggctacttgtctggcccggtggctttccacagctcaccttctgtcaggtgtccatcccagctccagccagctcccagagaggaagagactggcactgaggagtacatgaagatggacctggggccgggccggagggcagcctggcaggagagcactggggtcgagatgggcagactgggccctgcacctcccggggctgctagcatttgcaggcctacccgggcagtgcccagcagccggggtgactacatgaccatgcagatgagttgtccccgtcagagctacgtggacacctcgccagctgcccctgtaagctatgctgacatgcgaacaggcattgctgcagaggaggtgagcctgcccagggccaccatggctgctgcctcctcatcctcagcagcctctgcttccccgactgggcctcaaggggcagcagagctggctgcccactcgtccctgctggggggcccacaaggacctgggggcatgagcgccttcacccgggtgaacctcagtcctaaccgcaaccagagtgccaaagtgatccgtgcagacccacaagggtgccggcggaggcatagctccgagactttctcctcaacacccagtgccacccgggtgggcaacacagtgccctttggagcgggggcagcagtagggggcggtggcggtagcagcagcagcagcgaggatgtgaaacgccacagctctgcttcctttgagaatgtgtggctgaggcctggggagcttgggggagcccccaaggagccagccaaactgtgtggggctgctgggggtttggagaatggtcttaactacatagacctggatttggtcaaggacttcaaacagtgccctcaggagtgcacccctgaaccgcagcctcccccacccccaccccctcatcaacccctgggcagcggtgagagcagctccacccgccgctcaagtgaggatttaagcgcctatgccagcatcagtttccagaagcagccagaggaccgtcagtagctcaactggacatcacagcagaatgaagacctaaatgacctcagcaaatcctcttctaactcatgggtacccagactctaaatatttcatgattcacaactaggacctcatatcttcctcatcagtagatggtacgatgcatccatttcagtttgtttactttatccaatcctcaggatttcattgactgaactgcacgttctatattgtgccaagcgaaaaaaaaaaatgcactgtgacaccagaataatgagtctgcataaacttcatcttcaaccttaaggacttagctggccacagtgagctgatgtgcccaccaccgtgtcatgagagaatgggtttactctcaatgcattttcaagatacatttcatctgctgctgaaactgtgtacgacaaagcatcattgtaaattatttcatacaaaactgttcacgttgggtggagagagtattaaatatttaacataggttttgatttatatgtgtaattttttaaatgaaaatgtaacttttcttacagcacatcttttttttggatgtgggatggaggtatacaatgttctgttgtaaagagtggagcaaatgcttaaaacaaggcttaaaagagtagaatagggtatgatccttgttttaagattgtaattcagaaaacataatataagaatcatagtgccatagatggttctcaattgtatagttatatttgctgatactatctcttgtcatataaacctgatgttgagctgagttccttataagaattaatcttaattttgtattttttcctgtaagacaataggccatgttaattaaactgaagaaggatatatttggctgggtgttttcaaatgtcagcttaaaattggtaattgaatggaagcaaaattataagaagaggaaattaaagtcttccattgcatgtattgtaaacagaaggagatgggtgattccttcaattcaaaagctctctttggaatgaacaatgtgggcgtttgtaaattctggaaatgtctttctattcataataaactagatactgttgatcttttaaaaaaaaaaaaaaaaaaaaaaaaaaaaa

SEQ ID NO: 1387 - DNA, 579 bp; single-stranded, linear
  immediate source library: GENBANK
  immediate source clone: g388165
atggacgggtccggggagcagcccagaggcggggggcccaccagctctgagcagatcatgaagacaggggcccttttgcttcagggtttcatccaggatcgagcagggcgaatggggggggaggcacccgagctggccctggacccggtgcctcaggatgcgtccaccaagaagctgagcgagtgtctcaagcgcatcggggacgaactggacagtaacatggagctgcagaggatgattgccgccgtggacacagactccccccgagaggtctttttccgagtggcagctgacatgttttctgacggcaacttcaactggggccgggttgtcgcccttttctactttgccagcaaactggtgctcaaggccctgtgcaccaaggtgccggaactgatcagaaccatcatgggctggacattggacttcctccgggagcggctgttgggctggatccaagaccagggtggttgggacggcctcctctcctactttgggacgcccacgtggcagaccgtgaccatctttgtggcgggagtgctcaccgcctcgctcaccatctggaagaagatgggctga

SEQ ID NO: 1388 - DNA, 657 bp; single-stranded, linear
  immediate source library: GENBANK
  immediate source clone: g388167
atggacgggtccggggagcagcccagaggcggggggcccaccagctctgagcagatcatgaagacaggggcccttttgcttcagggtttcatccaggatcgagcagggcgaatggggggggaggcacccgagctggccctggacccggtgcctcaggatgcgtccaccaagaagctgagcgagtgtctcaagcgcatcggggacgaactggacagtaacatggagctgcagaggatgattgccgccgtggacacagactccccccgagaggtctttttccgagtggcagctgacatgttttctgacggcaacttcaactggggccgggttgtcgcccttttctactttgccagcaaactggtgctcaaggccctgtgcaccaaggtgccggaactgatcagaaccatcatgggctggacattggacttcctccgggagcggctgttgggctggatccaagaccagggtggttgggtgagactcctcaagcctcctcacccccaccaccgcgccctcaccaccgcccctgccccaccgtccctgccccccgccactcctctgggaccctgggccttctggagcaggtcacagtggtgccctctccccatcttcagatcatcagatgtggtctataatgcgttttccttacgtgtctga

SEQ ID NO: 1389 - DNA, 2863 bp; single-stranded, linear
  immediate source library: GENBANK
  immediate source clone: g392887
cctggcgaaagcaagacgtggaggttttaccaggggttagtagcttcctcttgctaactttttattgggacaaaaggcaagatggcaccattctgttctcagatatttgtctaaataaagcccttttaattttattttatttttgttgtgggattcttaagcagataagaagaaaagacaccttcctagtgagcagctgcccagctcctgctcagttttgcctcggggtagcacctccagccacagaaagcaagccggtaagtctctccaggtaggacttgctgcaacccagctgctggactgatctgaaacgggactttgcatactctccgaagtatggtgagttggtgctgacttcaaagttgcctggtgaaggaagataaggtggatcgcagagactaaggggagagggagaagccctgctcctcttctccccaccaaggcacaatgagcaacatctgtcagaggctctgggagtacctagaaccctatctcccctgtttgtccacggaggcagacaagtcaaccgtgattgaaaatccaggggccctttgctctccccagtcacagaggcatggccactactttgtggctttgtttgattaccaggctcggactgctgaggacttgagcttccgagcaggtgacaaacttcaagttctggacactttgcatgagggctggtggtttgccagacacttggagaaaagacgagatggctccagtcagcaactacaaggctatattccttctaactacgtggctgaggacagaagcctacaggcagagccgtggttctttggagcaatcggaagatcagatgcagagaaacaactattatattcagaaaacaagaccggttcctttctaatcagagaaagtgaaagccaaaaaggagaattctctctttcagttttagatggagcagttgtaaaacactacagaattaaaagactggatgaagggggattttttctcacgcgaagaagaatcttttcaacactgaacgaatttgtgagccactacaccaagacaagtgacggcctgtgtgtcaagctggggaaaccatgcttaaagatccaggtcccagctccatttgatttgtcgtataaaaccgtggaccaatgggagatagaccgcaactccatacagcttctgaagcgattgggatctggtcagtttggcgaagtatgggaaggtctgtggaacaataccactccagtagcagtgaaaacattaaaaccaggttcaatggatccaaatgacttcctgagggaggcacagataatgaagaacctaagacatccaaagcttatccagctttatgctgtttgcactttagaagatccaatttatattattacagagttgatgagacatggaagtctgcaagaatatctccaaaatgacactggatcaaaaatccatctgactcaacaggtagacatggcggcacaggttgcctctggaatggcctatctggagtctcggaactacattcacagagatctggctgccagaaatgtcctcgttggtgaacataatatctacaaagtagcagattttggacttgccagagtttttaaggtagataatgaagacatctatgaatctagacacgaaataaagctgccggtgaagtggactgcgcccgaagccattcgtagtaataaattcagcattaagtccgatgtatggtcatttggaatccttctttatgaaatcattacttatggcaaaatgccttacagtggtatgacaggtgcccaggtaatccagatgttggctcaaaactatagacttccgcaaccatccaactgtccacagcaattttacaacatcatgttggagtgctggaatgcagagcctaaggaacgacctacatttgagacactgcgttggaaacttgaagactattttgaaacagactcttcatattcagatgcaaataacttcataagatgaacactggagaagaatatcaaataataaagtagcaaaacaaattcaaataatccattccaaaatacaatgttatcaaccaactgcacaatcagtttatcctgacatattcaagtgataggataaagttggccatgtattatgaaaaagattatttgtgcattttattgactgggcaacactgcaggacagtcaaggtgatatataatttcctcactgcctggtaaaattaagcacactaaaccaagttatttttctttttaagagatacttacatttccatttattgtttgaaatgtcgatcaagagaatcaacagatgatagtccaatttttactcagtgactgttgtagcattttcctgtttactgattagagtggttattcattattcctcagattgctgaatcccatcaggctgttattatgaaggaatttgattgctttgctgcacagcaggacctgtgctttgagatttttttttctcttttaaaatatcctgtaactacaatgatggtaaagccatgttaaatgacttgattgtacttggagtaattgcacatttttttctatgcataaaaaaatgatgcagctgttgagaaaacgaagtctttttcattttgcagaaggaaatgatggaatttttctgtacttcagtatgtgtcaactgagagtcatatacattagttttaatctcttaatattgagaatcaggttgcaaaacggatgagttattatctatggaaatgtgagaaatgtctaatagcccataaagtctgagaaataggtatcaaaatagtttaggaaaatgagaggagaacagtagattgctgtggcctagacttctgagtaattaataaagaaaaagaagtaccctttggcctacaaaaaaaaaaaaaaaa

SEQ ID NO: 1390 - DNA, 490 bp; single-stranded, linear
  immediate source library: GENBANK
  immediate source clone: g396163
ctgctgagccatggctgaaggggaaatcaccaccttcacagccctgaccgagaagtttaatctgcctccagggaattacaagaagcccaaactcctctactgtagcaacgggggccacttcctgaggatccttccggatggcacagtggatgggacaagggacaggagcgaccagcacattcagctgcagctcagtgcggaaagcgtgggggaggtgtatataaagagtaccgagactggccagtacttggccatggacaccgacgggcttttatacggctcacagacaccaaatgaggaatgtttgttcctggaaaggctggaggagaaccattacaacacctatatatccaagaagcatgcagagaagaattggtttgttggcctcaagaagaatgggagctgcaaacgcggtcctcggactcactatggccagaaagcaatcttgtttctccccctgccagtctcttctgattaaagagatctgttc

SEQ ID NO: 1391 - DNA, 1702 bp; single-stranded, linear
  immediate source library: GENBANK
  immediate source clone: g397938
agactcaacaagagctccagcaaagactttcactgtagcttgacttgacctgagattaactagggaatcttgagaataaagatgagctctgaaaattgtttcgtagcagagaacagctctttgcatccggagagtggacaagaaaatgatgccaccagtccccatttctcaacacgtcatgaagggtccttccaagttcctgtcctgtgtgctgtaatgaatgtggtcttcatcaccattttaatcatagctctcattgccttatcagtgggccaatacaattgtccaggccaatacacattctcaatgccatcagacagccatgtttcttcatgctctgaggactgggttggctaccagaggaaatgctactttatttctactgtgaagaggagctggacttcagcccaaaatgcttgttctgaacatggtgctactcttgctgtcattgattctgaaaaggacatgaactttctaaaacgatacgcaggtagagaggaacactgggttggactgaaaaaggaacctggtcacccatggaagtggtcaaatggcaaagaatttaacaactggttcaacgttacagggtctgacaagtgtgtttttctgaaaaacacagaggtcagcagcatggaatgtgagaagaatttatactggatatgtaacaaaccttacaaataataaggaaacatgttcacttattgactattatagaatggaactcaaggaaatctgtgtcagtggatgctgctctgtggtccgaagtcttccatagagactttgtgaaaaaaaattttatagtgtcttgggaattttcttccaaacagaactatggaaaaaaaggaagaaattccaggaaaatctgcactgtgggcttttattgccatgagctagaagcatcacaggttgaccaataaccatgcccaagaatgagaagaatgactatgcaacctttggatgcactttatattattttgaatccagaaataatgaaataactaggcgtggacttactatttattgctgaatgactaccaacagtgagagcccttcatgcatttgcactactggaaggagttagatgttggtactagatactgaatgtaaacaaaggaattatggctggtaacataggtttttagtctaattgaatcccttaaactcagggagcatttataaatggacaaatgcttatgaaactaagatttgtaatatttctctctttttagagaaatttgccaatttactttgttatttttccccaaaaagaatgggatgatcgtgtatttatttttttacttcctcagctgtagacaggtccttttcgatggtacatatttctttgcctttataatcttttatacagtgtcttacagagaaaagacataagcaaagactatgaggaatatttgcaagacatagaatagtgttggaaaatgtgcaatatgtgatgtggcaaatctctattaggaaatattctgtaatcttcagacctagaataatactagtcttataataggtttgtgactttcctaaatcaattctattacgtgcaatacttcaatacttcatttaaaatatttttatgtgcaataaaatgtatttgtttgtattttgtgttcagtacaattataagctgtttttatatatgtgaaataaaagtagaataaacacaaaaaaaaaaaaaaaaaaaaaaaaaaaa

SEQ ID NO: 1392 - DNA, 5672 bp; single-stranded, linear
  immediate source library: GENBANK
  immediate source clone: g398028
aatggtttcaaagagagagaatattgccacccatcatttatatcaggcatgggatcctgtcccttctctgtctccggctactacaggtgccctcatcagccacgagaagctgctgctacagatcaaccccgagcgggagctggggagcatgagctacaaactcggccaggtgtccatacactccgtgtggctggggaacagcatcacacccctgagggaggaggaatgggacgaggaagaggaggaggaggccgacgcccctgcaccttcgtcaccacccacgtctccagtcaactccaggaaacaccgggctggagttgacatccactcctgttcgcagtttttgcttgagttgtacagccgctggatcctgccgtccagctcagccaggaggaccccggccatcctgatcagtgaggtggtcagatcccttctagtggtctcagacttgttcaccgagcgcaaccagtttgagctgatgtatgtgacgctgacagaactgcgaagggtgcacccttcagaagacgagatcctcgctcagtacctggtgcctgccacctgcaaggcagctgccgtccttgggatggacaaggccgtggcggagcctgtcagccgcctgctggagagcacgctcaggagcagccacctgcccagcagggttggagccctgcacggcatcctctatgtgctggagtgcgacctgctggacgacactgccaagcagctcatcccggtcatcagcgactatctcctctccaacctgaaagggatcgcccactgcgtgaacattcacagccagcagcacgtactggtcatgtgtgccactgcgttttacctcattgagaactatcctctggacgtagggccggaattttcagcatcaataatacagatgtgtggggtgatgctgtctggaagtgaggagtccaccccctccatcatttaccactgtgccctcagaggcctggagcgcctcctgctctctgagcagctctcccgcctggatgcagaatcgctggtcaagctgagtgtggacagagtgaacgtgcacagcccgcaccgggccatggcggctctgggcctgatgctcacctgcatgtacacaggaaaggagaaagtcagtccgggtagaacttcagaccctaatcctgcagcccccgacagcgagtcagtgattgttgctatggagcgggtatctgttctttttgataggatcaggaaaggctttccttgtgaagccagagtggtggccaggatcctgccccagtttctagacgacttcttcccaccccaggacatcatgaacaaagtcatcggagagtttctgtccaaccagcagccatacccccagttcatggccaccgtggtgtataaggtgtttcagactctgcacagcaccgggcagtcgtccatggtccgggactgggtcatgctgtccctctccaacttcacgcagagggccccggtcgccatggccacgtggagcctctcctgcttctttgtcagcgcgtccaccagcccgtgggtcgcggcgatcctcccacatgtcatcagcaggatgggcaagctggagcaggtggacgtgaaccttttctgcctggtcgccacagacttctacagacaccagatagaggaggagctcgaccgcagggccttccagtctgtgcttgaggtggttgcagccccaggaagcccatatcaccggctgctgacttgtttacgaaatgtccacaaggtcaccacctgctgagcgccatggtgggagagactgtgaggcggcagctggggccggagcctttggaagtctgtgcccttgtgccctgcctccaccgagccagcttggtccctatgggcttccgcacatgccgcgggcggccaggcaacgtgcgtgtctctgccatgtggcagaagtgctctttgtggcagtggccaggcagggagtgtctgcagtcctggtggggctgagcctgaggccttccagaaagcaggagcagctgtgctgcaccccatgtgggtgaccaggtcctttctcctgatagtcacctgctggttgttgccaggttgcagctgctcttgcatctgggccagaagtcctccctcctgcaggctggctgttggcccctctgctgtcctgcagtagaaggtgccgtgagcaggctttgggaacactggcctgggtctccctggtggggtgtgcatgccacgccccgtgtctggatgcacagatgccatggcctgtgctgggccagtggctgggggtgctagacacccggcaccattctcccttctctcttttcttctcaggatttaaaatttaattatatcagtaaagagattaattttaacgtaactctttctatgcccgtgtaaagtatgtgaatcgcaaggcctgtgctgcatgcgacagcgtccggggtggtggacagggcccccggccacgctccctctcctgtagccactggcatagccctcctgagcacccgctgacatttccgttgtacatgttcctgtttatgcattcacaaggtgactgggatgtagagaggcgttagtgggcaggtggccacagcaggactgaggacaggcccccattatcctaggggtgcgctcaactgcagcccctcctcctcgggcacagacgactgtcgttctccacccaccagtcagggacagcagcctccctgtcactcagctgagaaggccagccctccctggctgtgagcagcctccactgtgtccagagacatgggcctcccactcctgttccttgctagccctggggtggcgtctgcctaggagctggctggcaggtgttgggacctgctgctccatggatgcatgccctaagagtgtcactgagctgtgttttgtctgagcctctctcggtcaacagcaaagcttggtgtcttggcactgttagtgacagagcccagcatcccttctgcccccgttccagctgacatcttgcacggtgaccccttttagtcaggagagtgcagatctgtgctcatcggagactgccccacggccctgtcagagccgccactcctatccccaggacaggtccctggaccagcctcctgtttgcaggcccagaggagccaagtcattaaaatggaagtggattctggatggccgggctgctgctgatgtaggagctggatttgggagctctgcttgccgactggctgtgagacgaggcaggggctctgcttcctcagccctagaggcgagccaggcaaggttggcgactgtcatgtggcttggtttggtcatgcccgtcgatgttttgggtattgaatgtggtaagtggaggaaatgttggaactctgtgcaggtgctgccttgagacccccaagcttccacctgtccctctcctatgtggcagctggggagcagctgagatgtggacttgtatgctgcccacatacgtgagggggagctgaaagggagcccctgctcaaagggagcccctcctctgagcagcctctgccaggcctgtatgaggcttttcccaccagctcccaacagaggcctcccccagccaggaccacctcgtcctcgtggcggggcagcaggagcggtagaaaggggtccgatgtttgaggaggcccttaagggaagctactgaattataacacgtaagaaaatcaccattcttccgtattggttgggggctcctgtttctcatcctagctttttcctggaaaagcccgctagaaggtttgggaacgaggggaaagttctcagaactgttgctgctccccacccgcctcccgcctcccccgcaggttatgtcagcagctctgagacagcagtatcacaggccagatgttgttcctggctagatgtttacatttgtaagaaataacactgtgaatgtaaaacagagccattcccttggaatgcatatcgctgggctcaacatagagtttgtcttcctcttgtttacgacgtgatctaaaccagtccttagcaaggggctcagaacaccccgctctggcagtaggtgtcccccacccccaaagacctgcctgtgtgctccggagatgaatatgagctcattagtaaaaatgacttcacccacgcatatacataaagtatccatgcatgtgcatatagacacatctataattttacacacacacctctcaagacggagatgcatggcctctaagagtgcccgtgtcggttcttcctggaagttgactttccttagacccgccaggtcaagttagccgcgtgacggacatccaggcgtgggacgtggtcagggcagggctcattcattgcccactaggatcccactggcgaagatggtctccatatcagctctctgcagaagggaggaagactttatcatgttcctaaaaatctgtggcaagcacccatcgtattatccaaattttgttgcaaatgtgattaatttggttgtcaagttttgggggtgggctgtggggagattgcttttgttttcctgctggtaatatcgggaaagattttaatgaaaccagggtagaattgtttggcaatgcactgaagcgtgtttctttcccaaaatgtgcctcccttccgctgcgggcccagctgagtctatgtaggtgatgtttccagctgccaagtgctctttgttactgtccaccctcatttctgccagcgcatgtgtcctttcaaggggaaaatgtgaagctgaaccccctccagacacccagaatgtagcatctgagaaggccctgtgccctaaaggacacccctcgcccccatcttcatggagggggtcatttcagagccctcggagccaatgaacagctcctcctcttggagctgagatgagccccacgtggagctcgggacggatagtagacagcaataactcggtgtgtggccgcctggcaggtggaacttcctcccgttgcggggtggagtgaggttagttctgtgtgtctggtgggtggagtcaggcttctcttgctacctgtgagcatccttcccagcagacatcctcatcgggctttgtccctcccccgcttcctccctctgcggggaggacccgggaccacagctgctggccagggtagacttggagctgtcctccagaggggtcacgtgtaggagtgagaagaaggaagatcttgagagctgctgagggaccttggagagctcaggatggctcagacgaggacactcgcttgccgggcctggccctcctgggaaggagggagctgctcagaatgccgcatgacaactgaaggcaacctggaaggttcagggcccgctcttcccccatgtgcctgtcacgctctggtgcagtcaaaggaacgccttcccctcagttgtttctaagagcagagtctcccgctgcaatctgggtggtaactgccagccttggaggatcgtggccaacgtggacctgcctacggagggtgggctctgacccaagtggggcctccttgcccaggtctcactgctttgcaccgtggtcagagggactgtcagctgagcttgagctcccctggagccagcagggctgtgatgggcgagtcccggagccccacccagacctgaatgcttctgagagcaaagggaaggactgacgagagatgtatatttaattttttaactgctgcaaacattgtacatccaaattaaagggaaaaaatggaaaccatcaa

SEQ ID NO: 1393 - DNA, 1502 bp; single-stranded, linear
  immediate source library: GENBANK
  immediate source clone: g400362
gcctccccagagacaacaccgggagcctcatctctctcctcaccctgctgtgactccaccacaggtttctagagccatctgggctgtccgggaacctggaccagactctggcccagtaggatgtccccgtgtcctccccagcagagcaggaacagggtgatacagctgtccacttcagagctaggagagatggaactgacttggcaggagatcatgtccatcaccgagctgcagggtctgaatgctccaagtgagccatcatttgagccccaagccccagctccataccttggacctccaccacccacaacttactgcccctgctcaatccacccagattctggcttcccacttcctccaccaccttatgagctcccagcatccacatcccatgtcccagatcccccatactcctatggcaacatggccataccagtctccaagccactgagcctctcaggcctgctcagtgagccgctccaagaccccttagccctcctggacattgggctgccagcagggccacctaagccccaagaagacccagaatccgactcaggattatccctcaactatagcgatgctgaatctcttgagctggaggggacagaggctggtcggcggcgcagcgaatatgtagagatgtacccagtggagtacccctactcactcatgcccaactccttggcccactccaactataccttgccagctgctgagacccccttggccttagagccctcctcaggccctgtgcgggctaagcccactgcacggggggaggcagggagtcgggatgaacgtcgggccttggccatgaagattccttttcctacggacaagattgtcaacttgccggtagatgactttaatgagctattggcaaggtacccgctgacagagagccagctagcgctagtccgggacatccgacgacggggcaaaaacaaggtggcagcccagaactgccgcaagaggaagctggaaaccattgtgcagctggagcgggagctggagcggctgaccaatgaacgggagcggcttctcagggcccgcggggaggcagaccggaccctggaggtcatgcgccaacagctgacagagctgtaccgtgacattttccagcaccttcgggatgaatcaggcaacagctactctcctgaagagtacgcgctgcaacaggctgccgatgggaccatcttccttgtgccccgggggaccaagatggaggccacagactgagctggcccagaggggtggaactgctgatgggatttccttcattcccttctgataaaggtactccccaaccctgagtcccagaaggagctgagttctctagaccagaagaggatgacaatggcaacaagtgtttggaagttccaaggtgtgttcaaagaggcttgccttgagggagggctggaatctgtcttccctgactcggctcctcaggtctttagcctccaccttgtctaagctttggtctataaagtgcgctacag

SEQ ID NO: 1394 - DNA, 1970 bp; single-stranded, linear
  immediate source library: GENBANK
  immediate source clone: g402196
aggaaacggtttattaggagggagtggtggagctgggccaggcaggaagacgctggaataagaaacatttttgctccagcccccatcccagtcccgggaggctgccgcgccagctgcgccgagcgagcccctccccggctccagcccggtccggggccgcgccggaccccagcccgccgtccagcgctggcggtgcaactgcggccgcgcggtggaggggaggtggccccggtccgccgaaggctagcgccccgccacccgcagagcgggcccagagggaccatgaccttgggctcccccaggaaaggccttctgatgctgctgatggccttggtgacccagggagaccctgtgaagccgtctcggggcccgctggtgacctgcacgtgtgagagcccacattgcaaggggcctacctgccggggggcctggtgcacagtagtgctggtgcgggaggaggggaggcacccccaggaacatcggggctgcgggaacttgcacagggagctctgcagggggcgccccaccgagttcgtcaaccactactgctgcgacagccacctctgcaaccacaacgtgtccctggtgctggaggccacccaacctccttcggagcagccgggaacagatggccagctggccctgatcctgggccccgtgctggccttgctggccctggtggccctgggtgtcctgggcctgtggcatgtccgacggaggcaggagaagcagcgtggcctgcacagcgagctgggagagtccagtctcatcctgaaagcatctgagcagggcgacacgatgttgggggacctcctggacagtgactgcaccacagggagtggctcagggctccccttcctggtgcagaggacagtggcacggcaggttgccttggtggagtgtgtgggaaaaggccgctatggcgaagtgtggcggggcttgtggcacggtgagagtgtggccgtcaagatcttctcctcgagggatgaacagtcctggttccgggagactgagatctataacacagtattgctcagacacgacaacatcctaggcttcatcgcctcagacatgacctcccgcaactcgagcacgcagctgtggctcatcacgcactaccacgagcacggctccctctacgactttctgcagagacagacgctggagccccatctggctctgaggctagctgtgtccgcggcatgcggcctggcgcacctgcacgtggagatcttcggtacacagggcaaaccagccattgcccaccgcgacttcaagagccgcaatgtgctggtcaagagcaacctgcagtgttgcatcgccgacctgggcctggctgtgatgcactcacagggcagcgattacctggacatcggcaacaacccgagagtgggcaccaagcggtacatggcacccgaggtgctggacgagcagatccgcacggactgctttgagtcctacaagtggactgacatctgggcctttggcctggtgctgtgggagattgcccgccggaccatcgtgaatggcatcgtggaggactatagaccacccttctatgatgtggtgcccaatgaccccagctttgaggacatgaagaaggtggtgtgtgtggatcagcagacccccaccatccctaaccggctggctgcagacccggtcctctcaggcctagctcagatgatgcgggagtgctggtacccaaacccctctgcccgactcaccgcgctgcggatcaagaagacactacaaaaaattagcaacagtccagagaagcctaaagtgattcaatagcccaggagcacctgattcctttctgcctgcagggggctgggggggtggggggcagtggatggtgccctatctgggtagaggtagtgtgagtgtggtgtgtgctggggatgggcagctgcgcctgcctgctcggcccccagcccacccagccaaaaatacagctgggctgaaacctg

SEQ ID NO: 1395 - DNA, 3575 bp; single-stranded, linear
  immediate source library: GENBANK
  immediate source clone: g402646
cgggaggaggtcccccgacatgcctgaggcaaaaccagcggccaaaaaggcccccaaaggcaaagatgcccccaaaggagcccccaaggaggctccccctaaggaggctcctgcagaggcccccaaagaagccccacccgaggaccagtccccgactgcagaggagcccaccggcgttttcctgaagaagccggactccgtctcagtggagactgggaaggacgcagtggtcgtggccaaggtgaacgggaaggagctcccagacaaaccgaccatcaagtggttcaaggggaagtggctggagctgggcagcaagagtggcgcccgcttctccttcaaggagtcccacaactccgccagcaatgtgtacaccgtggagctgcacattgggaaggtggtactgggggaccgtgggtattaccgcctcgaggtcaaagccaaggacacctgtgacagctgtggcttcaacatcgatgtggaggcaccccgtcaggatgcctctgggcagagtctagaaagcttcaagcgtacgagtgaaaagaagtcggatactgcaggtgagctggatttcagtggcctgttgaagaagagggaggtggtggaggaggagaagaagaagaaaaagaaagatgacgatgacctaggcatccccccggagatttgggagctcctgaaaggggcaaagaagagcgagtacgagaaaatcgccttccagtatggcatcaccgacctccggggcatgctgaagcggctgaaaaaggctaaggtcgaggtcaagaagagtgcagcattcacaaagaagctggatccagcctaccaagtggacagaggcaacaagatcaagttgatggtagagatcagcgacccagacctgaccctcaagtggttcaagaacggccaggagatcaaaccaagcagcaagtacgtgtttgagaacgttggtaagaagcgaattcttaccatcaacaagtgcacgctggcggatgacgctgcctatgaagtagctgtcaaggatgagaagtgtttcaccgagctcttcgtcaaagaacctccagtcctaattgtcacacctcttgaggaccagcaggtgtttgtgggtgaccgggtggaaatggcagtggaggtgtcagaagagggtgcccaggtgatgtggatgaaagatggtgtggaactgactcgggaggattccttcaaggcccggtaccgcttcaagaaggacgggaagcgccacatcctcatcttctcagacgtggtccaggaggacaggggtcgctatcaggtcataaccaatggcggccagtgtgaggccgagctgattgtggaagagaaacagctggaggtcctgcaggacatcgcggatctgacggtgaaggcctcagaacaagctgtgttcaagtgcgaggtgtctgatgagaaagtgacgggcaagtggtataagaatggggtcgaggtgcggcccagcaagaggatcaccatttcccatgtaggcaggttccacaagctggtgatcgatgacgtccgccccgaggatgagggagactacacgtttgtgcctgacggctacgcccttggttcgctctcggccaagctcaacttcctggaaatcaaggtggagtacgttcccaagcaagagccaccaaagatccacttggattgctcggggaagacctcagagaatgcgattgtggttgtggctggaaacaagctgaggcttgacgtgtccatcacaggggagccccctcccgtcgctacctggctgaagggagatgaggtattcacgaccaccgagggcaggacccgcatcgagaagcgggtggactgcagcagctttgtgattgagagtgcgcagcgggaagacgagggccgctacaccatcaaggtcaccaaccccgtcggcgaggacgtggcttccatcttcctgcaagttgtagatgtcccagaccccccggaggctgtgcgcatcacctcggttggagaggattgggccatccttgtctgggagccaccaatgtacgatggggggaagccagtcaccgggtacctcgtagagcggaagaagaagggctctcagcgctggatgaagctgaactttgaggtcttcacagagaccacctatgagtccaccaagatgatcgagggcatcctctatgagatgcgtgtcttcgccgtcaatgctataggggtctcccagcccagcatgaacaccaagccttttatgcctattgcacccacgagtgaacccctgcacctgatagtggaggatgtgacagacaccaccaccacactcaagtggaggcctccgaacaggatcggggcaggtggcatcgatgggtacctggtggagtactgcctggaaggctccgaggaatgggtccctgccaacaccgagcccgtggagcgctgtggcttcaccgtcaagaatctcccgaccggagccagaatcctcttccgagtagttggggtcaacatcgcggggcgcacggagccggccaccctggcccagccggtcaccatcagggagattgcggagccacccaagatccggcttccccgccatctccgccagacctacatccgcaaagtgggcgagcagctcaaccttgtcgtccccttccagggaaagccccggccccaggtggtgtggaccaagggcggggccccgctggacacctcccgcgtgcacgtgcggaccagcgacttcgacaccgtgttcttcgtgcgccaggcggcccgctccgactccggggagtacgagctgagcgtgcagatcgagaacatgaaggacaccgccaccatccgcatccgcgttgtggaaaaggctgggccccccataaacgtgatggtgaaggaggtgtggggcacgaacgcgctggtggagtggcaggcccccaaagatgatgggaacagtgagatcatggggtatttcgtccagaaagcagacaaaaaaaccatggagtggttcaacgtctatgaacgtaacaggcacactagctgtactgtgtccgaccttatcgtgggcaatgaatactatttccgagtttacaccgagaacatctgtgggctcagtgactcacctggtgtctccaagaacacggcccgcatcctcaagacaggaatcaccttcaaaccgttcgagtataaggagcatgacttccggatggctcccaagttcctgacacctctcatagaccgcgtggtcgtggctgggtactcggcagccctcaactgtgctgtcagaggccacccgaagccgaaggtggtctggatgaagaacaagatggaaatccgtgaagatcccaagttcctgataaccaattaccaaggagtcctgacgctgaacatccgtcgcccctcgcccttcgacgctgggacttacacctgccgggccgtcaacgagctgggcgaggcgctggctgagtgcaagctggaggtccgagtgccgcagtgagacctgtcccctacctgccaagacaattggtggtggagtcctgaccccaatccccaacctcccaggactgtgttctttctggagttttcgctgagaacaaaacagtgttgtctggaaaaaaaaaaaa

SEQ ID NO: 1396 - DNA, 2376 bp; single-stranded, linear
  immediate source library: GENBANK
  immediate source clone: g404012
cgcgcggcccctgtcctccggcccgagatgaatcctgcggcagaagccgagttcaacatcctcctggccaccgactcctacaaggttactcactataaacaatatccacccaacacaagcaaagtttattcctactttgaatgccgtgaaaagaagacagaaaactccaaattaaggaaggtgaaatatgaggaaacagtattttatgggttgcagtacattcttaataagtacttaaaaggtaaagtagtaaccaaagagaaaatccaggaagccaaagatgtctacaaagaacatttccaagatgatgtctttaatgaaaagggatggaactacattcttgagaagtatgatgggcatcttccaatagaaataaaagctgttcctgagggctttgtcattcccagaggaaatgttctcttcacggtggaaaacacagatccagagtgttactggcttacaaattggattgagactattcttgttcagtcctggtatccaatcacagtggccacaaattctagagagcagaagaaaatattggccaaatatttgttagaaacttctggtaacttagatggtctggaatacaagttacatgattttggctacagaggagtctcttcccaagagactgctggcataggagcatctgctcacttggttaacttcaaaggaacagatacagtagcaggacttgctctaattaaaaaatattatggaacgaaagatcctgttccaggctattctgttccagcagcagaacacagtaccataacagcttgggggaaagaccatgaaaaagatgcttttgaacatattgtaacacagttttcatcagtgcctgtatctgtggtcagcgatagctatgacatttataatgcgtgtgagaaaatatggggtgaagatctaagacatttaatagtatcgagaagtacacaggcaccactaataatcagacctgattctggaaaccctcttgacactgtgttaaaggttttggagattttaggtaagaagtttcctgttactgagaactcaaagggttacaagttgctgccaccttatcttagagttattcaaggggatggagtagatattaataccttacaagagattgtagaaggcatgaaacaaaaaatgtggagtattgaaaatattgccttcggttctggtggaggtttgctacagaagttgacaagagatctcttgaattgttccttcaagtgtagctatgttgtaactaatggccttgggattaacgtcttcaaggacccagttgctgatcccaacaaaaggtccaaaaagggccgattatctttacataggacgccagcagggaattttgttacactggaggaaggaaaaggagaccttgaggaatatggtcaggatcttctccatactgtcttcaagaatggcaaggtgacaaaaagctattcatttgatgaaataagaaaaaatgcacagctgaatattgaactggaagcagcacatcattaggctttatgactgggtgtgtgttgtgtgtatgtaatacataatgtttattgtacagatgtgtggggtttgtgttttatgatacattacagccaaattatttgttggtttatggacatactgccctttcattttttttcttttccagtgtttaggtgatctcaaattaggaaatgcatttaaccatgtaaaagatgagtgctaaagtaagctttttagggccctttgccaataggtagtcattcaatctggtattgatcttttcacaaataacagaactgagaaacttttatatataactgatgatcacataaaacagatttgcataaaattaccatgattgctttatgtttatatttaacttgtatttttgtacaaacaagattgtgtaagatatatttgaagtttcagtgatttaacagtctttccaacttttcatgatttttatgagcacagactttcaagaaaatacttgaaaataaattacattgccttttgtccattaatcagcaaataaaacatggccttaacaaagttgtttgtgttattgtacaatttgaaaattatgtcgggacataccctatagaattactaaccttactgccccttgtagaatatgtattaatcattctacattaaagaaaataatggttcttactggaatgtctaggcactgtacagttattatatatcttggttgttgtattgtaccagtgaaatgccaaatttgaaaggcctgtactgcaattttatatgtcagagattgcctgtggctctaatatgcacctcaagattttaaggagataatgtttttagagagaatttctgcttccactatagaatatatacataaatgtaaaatacttacaaaagtgg

SEQ ID NO: 1397 - DNA, 1336 bp; single-stranded, linear
  immediate source library: GENBANK
  immediate source clone: g407074
tcccagggccagagcccgccggtgccgttccccgccccggccccgccgccgcagccccccacccctgccctgccgcaccccccggcgcagccgccgccgccgcccccgcagcagttcccgcagttccacgtcaagtccggcctgcagatcaagaagaacgccatcatcgatgactacaaggtcaccagccaggtcctggggctgggcatcaacggcaaagttttgcagatcttcaacaagaggacccaggagaaattcgccctcaaaatgcttcaggactgccccaaggcccgcagggaggtggagctgcactggcgggcctcccagtgccccgacatcgtacggatcgtggatgtgtacgagaatctgtacgcagggaggaagtgcctgctgattgtcatggaatgtttggacggtggagaactctttagccgaatccaggatcgaggagaccaggcattcacagaaagagaagcatccgaaatcatgaagagcatcggtgaggccatccagtatctgcattcaatcaacattgcccatcgggatgtcaagcctgagaatctcttatacacctccaaaaggcccaacgccatcctgaaactcactgactttggctttgccaaggaaaccaccagccacaactctttgaccactccttgttatacaccgtactatgtggctccagaagtgctgggtccagagaagtatgacaagtcctgtgacatgttggtcctgggtgtcatcatgtacattctgctgtgtgggtatccccccttctactccaaccacggccttgccatctctccgggcatgaagactcgcatccgaatgggccagtatgaatttcccaacccagaatggtcagaagtatcagaggaagtgaagatgctcattcggaatctgctgaaaacagagcccacccagagaatgaccatcaccgagtttatgaaccacccttggatcatgcaatcaacaaaggtccctcaaaccccactgcacaccagccgggtcctgaaggaggacaaggagcggtgggaggatgtcaaggaggagatgaccagtgccttggccacaatgcgcgttgactacgagcagatcaagataaaaaagattgaagatgcatccaaccctctgctgctgaagaggcggaagaaagctcgggccctggaggctgcggctctggcccactgagccaccgcgccctcctgcccacgggaggacaagcaataactctctacaggaatatattttttaaacgaagagacagaactgtccacatctgcctcctctcctcctcagctgcatggagcctggaactgcatcagtgactgaattc

SEQ ID NO: 1398 - DNA, 1790 bp; single-stranded, linear
  immediate source library: GENBANK
  immediate source clone: g407806
caggtcctgggagaggacagaaaacaactggactcctcagcccccggcagctcccagtgcccagccacccacaacacaacccaaagccttctagacaagctcagtggaatctgaagggcccaccccatggaggaatgctgggtgacagagatagccaatggctccaaggatggcttggattccaaccctatgaaggattacatgatcctgagtggtccccagaagacagctgttgctgtgttgtgcactcttctgggcctgctaagtgccctggagaacgtggctgtgctctatctgatcctgtcctcccaccaactccgccggaagccctcatacctgttcattggcagcttggctggggctgacttcctggccagtgtggtctttgcatgcagctttgtgaatttccatgttttccatggtgtggattccaaggctgtcttcctgctgaagattggcagcgtgactatgaccttcacagcctctgtgggtagcctcctgctgaccgccattgaccgatacctctgcctgcgctatccaccttcctacaaagctctgctcacccgtggaagggcactggtgaccctgggcatcatgtgggtcctctcagcactagtctcctacctgcccctcatgggatggacttgctgtcccaggccctgctctgagcttttcccactgatccccaatgactacctgctgagctggctcctgttcatcgccttcctcttttccggaatcatctacacctatgggcatgttctctggaaggcccatcagcatgtggccagcttgtctggccaccaggacaggcaggtgccaggaatggcccgaatgaggctggatgtgaggttggccaagaccctagggctagtgttggctgtgctcctcatctgttggttcccagtgctggccctcatggcccacagcctggccactacgctcagtgaccaggtcaagaaggcctttgctttctgctccatgctgtgcctcatcaactccatggtcaaccctgtcatctatgctctacggagtggagagatccgctcctctgcccatcactgcctggctcactggaagaagtgtgtgaggggccttgggtcagaggcaaaagaagaagccccgagatcctcagtcaccgagacagaggctgatgggaaaatcactccgtggccagattccagagatctagacctctctgattgctgatgaggcctcttcccaatttaaacaactcaagtcagaaatcagttcactccctggaagagagagaggggtcttggcactctcttcttacttaaaccagtcccagacacctagacacggacccctttttgctgatgagtgttgggactgactcctggaagacagcctggccttgcccacctgcacacagtctgttggataggtagggccacgaggagtagccaggtaggcgagacacaaaaaggcctgggacagggtcagtacaagtcaggacaggcttcatgcctgcatcctccagagaccaccaggagccaaagcgagcctccaggcccagcaatgagggacttgggagaaatctgagaagaatgggttgttctcttgggaagtcagggtatcagatgggatggacatccaggtcttctctctgcctaattgtcaaggcctccttggctctggagctatgaaaggccccactttcaagtcacccttgccactgaggaccgaggactatgctatgatgaggattaaggtgttgacttgcctctttcagagataaatgacaagccttcaaaaaaaaaaaaaaa

SEQ ID NO: 1399 - DNA, 1440 bp; single-stranded, linear
  immediate source library: GENBANK
  immediate source clone: g414316
ggaattccgtagctattgatttcccggatctggtaacatggcaaaagatgccggtctaattgaagccaacggagaactcaaggtcttcatagaccagaaccttagtcccgggaaaggcgtggtgtccctcgtggccgttcacccctccaccgtcaacccgctcgggaagcagctcttgccaaaaacctttggacagtccaatgtcaacattgcccagcaagtggtaattggtacgcctcagagaccggcagcgtcaaacaccctggtggtaggaagcccacacacccccagcactcactttgcctctcagaaccagccttccgactcctcaccttggtctgccgggaagcgcaacaggaaaggagagaagaatggcaagggcctacggcatttctccatgaaggtctgcgagaaggtgcagaggaaagggaccacttcctacaacgaagtggcagacgagctggttgcggagttcagtgctgccgacaaccacatcttaccaaacgagtcagcttatgaccagaaaaacataagacggcgcgtctacgatgccttaaacgtgctaatggccatgaacatcatctccaaggagaagaaggagatcaagtggattggtctgcccaccaactcggctcaggaatgtcagaacttagaggtggaaagacagaggagacttgaaagaataaaacagaaacagtctcaacttcaagaacttattctacagcaaattgccttcaagaacctggtgcagagaaaccggcatgcggagcagcaggccagccggccaccgccacccaactcagtcatccacctgcccttcatcatcgtcaacaccagcaagaagacggtcatcgactgcagcatctccaatgacaaatttgagtatctgtttaattttgacaacacatttgaaatccacgatgacatagaagtgctgaagcggatgggcatggcttgcgggctggagtcggggagctgctctgccgaagaccttaaaatggccagaagtctggtccccaaggctctggagccatacgtgacagaaatggctcagggaactgttggaggcgtgttcatcacgacggcaggttccacgtctaacggcacaaggttctctgccagtgacctgaccaacggtgcagatgggatgctggccacaagctccaatgggtctcagtacagcggctccagggtggagactccggtgtcctacgtcggggaggacgacgaggaggacgatgacttcaacgagaatgacgaggacgactgacgtcctccccacttcagattcggcttcaggaaaacgtttagcgaaaagaaactttttttttaatgtgggttttctgtttccttttggcctagtcccaagaagatattggtaagctattgaatttagatatgcacctctgataagcaaggattgtttcccgtagattagga

SEQ ID NO: 1400 - DNA, 3427 bp; single-stranded, linear
  immediate source library: GENBANK
  immediate source clone: g415822
gctcgcgcacggctccgcggtcccttttgcctgtccagccggccgcctgtccctgctccctccctccgtgagtgtccgggttcccttcgcccagctctcccacccctacccgaccccggcgcccgggctcccagagggaactgcacttcggcagagttgaatgaatgaagagagacgcggagaactcctaaggaggagattggacaggctggactccccattgcttttctaaaaatcttggaaactttgtccttcattgaattacgacactgtccacctttaatttcctcgaaaacgcctgtaactcggctgaagccatgccttgtgttcaggcgcagtatgggtcctcgcctcaaggagccagccccgcttctcagagctacagttaccactcttcgggagaatacagctccgatttcttaactccagagtttgtcaagtttagcatggacctcaccaacactgaaatcactgccaccacttctctccccagcttcagtacctttatggacaactacagcacaggctacgacgtcaagccaccttgcttgtaccaaatgcccctgtccggacagcagtcctccattaaggtagaagacattcagatgcacaactaccagcaacacagccacctgcccccccagtctgaggagatgatgccgcactccgggtcggtttactacaagccctcctcgcccccgacgcccaccaccccgggcttccaggtgcagcacagccccatgtgggacgacccgggatctctccacaacttccaccagaactacgtggccactacgcacatgatcgagcagaggaaaacgccagtctcccgcctctccctcttctcctttaagcaatcgccccctggcaccccggtgtctagttgccagatgcgcttcgacgggcccctgcacgtccccatgaacccggagcccgccggcagccaccacgtggtggacgggcagaccttcgctgtgcccaaccccattcgcaagcccgcgtccatgggcttcccgggcctgcagatcggccacgcgtctcagctgctcgacacgcaggtgccctcaccgccgtcgcggggctccccctccaacgaggggctgtgcgctgtgtgtggggacaacgcggcctgccaacactacggcgtgcgcacctgtgagggctgcaaaggcttctttaagcgcacagtgcaaaaaaatgcaaaatacgtgtgtttagcaaataaaaactgcccagtggacaagcgtcgccggaatcgctgtcagtactgccgatttcagaagtgcctggctgttgggatggtcaaagaagtggttcgcacagacagtttaaaaggccggagaggtcgtttgccctcgaaaccgaagagcccacaggagccctctcccccttcgcccccggtgagtctgatcagtgccctcgtcagggcccatgtcgactccaacccggctatgaccagcctggactattccaggttccaggcgaaccctgactatcaaatgagtggagatgacacccagcatatccagcaattctatgatctcctgactggctccatggagatcatccggggctgggcagagaagatccctggcttcgcagacctgcccaaagccgaccaagacctgctttttgaatcagctttcttagaactgtttgtccttcgattagcatacaggtccaacccagtggagggtaaactcatcttttgcaatggggtggtcttgcacaggttgcaatgcgttcgtggctttggggaatggattgattccattgttgaattctcctccaacttgcagaatatgaacatcgacatttctgccttctcctgcattgctgccctggctatggtcacagagagacacgggctcaaggaacccaagagagtggaagaactgcaaaacaagattgtaaattgtctcaaagaccacgtgactttcaacaatggggggttgaaccgccccaattatttgtccaaactgttggggaagctcccagaacttcgtaccctttgcacacaggggctacagcgcattttctacctgaaattggaagacttggtgccaccgccagcaataattgacaaacttttcctggacactttacctttctaagacctcctcccaagcacttcaaaggaactggaatgataatggaaactgtcaagagggggcaagtcacatgggcagagatagccgtgtgagcagtctcagctcaagctgccccccatttctgtaaccctcctagcccccttgatccctaaagaaaacaaacaaacaaacaaaaactgttgctatttcctaacctgcaggcagaacctgaaagggcattttggctccggggcatcctggatttagaacatggactacacacaatacagtggtataaactttttattctcagtttaaaaatcagtttgttgttcagaagaaagattgctataaggtataatgggaaatgtttggccatgcttggttgttgcagttcagacaaatgtaacacacacacacatacacacacacacacacacagagacacatcttaaggggacccacaagtattgccctttaacaagacttcaaagttttctgctgtaaagaaagctgtaatatatagtaaaactaaatgttgcgtgggtggcatgagttgaagaaggcaaaggcttgtaaatttacccaatgcagtttggctttttaaattattttgtgcctatttatgaataaatattacaaattctaaaagataagtgtgtttgcaaaaaaaaagaaaataaatacataaaaaagggacaagcatgttgattctaggttgaaaatgttataggcacttgctacttcagtaatgtctatattatataaatagtatttcagacactatgtagtctgttagattttataaagattggtagttatctgagcttaaacattttctcaattgtaaaataggtgggcacaagtattacacatcagaaaatcctgacaaaagggacacatagtgtttgtaacaccgtccaacattccttgtttgtaagtgttgtatgtaccgttgatgttgataaaaagaaagtttatatcttgattattttgttgtctaaagctaaacaaaacttgcatgcagcagcttttgactgtttccagagtgcttataatatacataactccctggaaataactgagcactttgaattttttttatgtctaaaattgtcagttaatttattattttgtttgagtaagaattttaatattgccatattctgtagtatttttctttgtatatttctagtatggcacatgatatgagtcactgcctttttttctatggtgtatgacagttagagatgctgattttttttctgataaattctttctttgagaaagacaattttaatgtttacaacaataaaccatgtaaatgaaaaaaaaaa

SEQ ID NO: 1401 - DNA, 5228 bp; single-stranded, linear
  immediate source library: GENBANK
  immediate source clone: g416141
cacggcccagacccaggattctttatagacggcccaggctcctcctccgcccgggccgcctcacctgcgggcattgcgcgccgcctccgccggtgtagacggcacctgcgccgccttgctcgcgggtctccgccctcgcccaccctcactgcgccaggcccaggcagctcacctgtactggcgcgggctgcggaagctgcgtgacgcgaggcgttgaggcgcggcgcccacgccactgtcccgagaggacgcaggtggagcgggcgcgacttcgcgaacccggcgccggccgccgcagtggtcccagcctacaccgggttccggggacccggccgccagtgcccggggagtagccgccgccgtcggctgggcaccatgaacagcagcagcgccaacatcacctacgccagtcgcaagcggcggaagccggtgcagaaaacagtaaagccaatcccagctgaaggaatcaagtcaaatccttccaagcggcatagagaccgacttaatacagagttggaccgtttggctagcctgctgcctttcccacaagatgttattaataagttggacaaactttcagttcttaggctcagcgtcagttacctgagagccaagagcttctttgatgttgcattaaaatcctcccctactgaaagaaacggaggccaggataactgtagagcagcaaatttcagagaaggcctgaacttacaagaaggagaattcttattacaggctctgaatggctttgtattagttgtcactacagatgctttggtcttttatgcttcttctactatacaagattatctagggtttcagcagtctgatgtcatacatcagagtgtatatgaacttatccataccgaagaccgagctgaatttcagcgtcagctacactgggcattaaatccttctcagtgtacagagtctggacaaggaattgaagaagccactggtctcccccagacagtagtctgttataacccagaccagattcctccagaaaactctcctttaatggagaggtgcttcatatgtcgtctaaggtgtctgctggataattcatctggttttctggcaatgaatttccaagggaagttaaagtatcttcatggacagaaaaagaaagggaaagatggatcaatacttccacctcagttggctttgtttgcgatagctactccacttcagccaccatccatacttgaaatccggaccaaaaattttatctttagaaccaaacacaaactagacttcacacctattggttgtgatgccaaaggaagaattgttttaggatatactgaagcagagctgtgcacgagaggctcaggttatcagtttattcatgcagctgatatgctttattgtgccgagtcccatatccgaatgattaagactggagaaagtggcatgatagttttccggcttcttacaaaaaacaaccgatggacttgggtccagtctaatgcacgcctgctttataaaaatggaagaccagattatatcattgtaactcagagaccactaacagatgaggaaggaacagagcatttacgaaaacgaaatacgaagttgccttttatgtttaccactggagaagctgtgttgtatgaggcaaccaacccttttcctgccataatggatcccttaccactaaggactaaaaatggcactagtggaaaagactctgctaccacatccactctaagcaaggactctctcaatcctagttccctcctggctgccatgatgcaacaagatgagtctatttatctctatcctgcttcaagtacttcaagtactgcaccttttgaaaacaactttttcaacgaatctatgaatgaatgcagaaattggcaagataatactgcaccgatgggaaatgatactatcctgaaacatgagcaaattgaccagcctcaggatgtgaactcatttgctggaggtcacccagggctctttcaagatagtaaaaacagtgacttgtacagcataatgaaaaacctaggcattgattttgaagacatcagacacatgcagaatgaaaaatttttcagaaatgatttttctggtgaggttgacttcagagacattgacttaacggatgaaatcctgacgtatgtccaagattctttaagtaagtctcccttcataccttcagattatcaacagcaacagtccttggctctgaactcaagctgtatggtacaggaacacctacatctagaacagcaacagcaacatcaccaaaagcaagtagtagtggagccacagcaacagctgtgtcagaagatgaagcacatgcaagttaatggcatgtttgaaaattggaactctaaccaattcgtgcctttcaattgtccacagcaagacccacaacaatataatgtctttacagacttacatgggatcagtcaagagttcccctacaaatctgaaatggattctatgccttatacacagaactttatttcctgtaatcagcctgtattaccacaacattccaaatgtacagagctggactaccctatggggagttttgaaccatccccataccccactacttctagtttagaagattttgtcacttgtttacaacttcctgaaaaccaaaagcatggattaaatccacagtcagccataataactcctcagacatgttatgctggggccgtgtcgatgtatcagtgccagccagaacctcagcacacccacgtgggtcagatgcagtacaatccagtactgccaggccaacaggcatttttaaacaagtttcagaatggagttttaaatgaaacatatccagctgaattaaataacataaataacactcagactaccacacatcttcagccacttcatcatccgtcagaagccagaccttttcctgatttgacatccagtggattcctgtaattccaagcccaattttgaccctggtttttggattaaattagtttgtgaaggattatggaaaaataaaactgtcactgttggacgtcagcaagttcacatggaggcattgatgcatgctattcacaattattccaaaccaaattttaatttttgcttttagaaaagggagtttaaaaatggtatcaaaattacatatactacagtcaagatagaaagggtgctgccacggagtggtgaggtaccgtctacatttcacattattctgggcaccacaaaatatacaaaactttatcagggaaactaagattcttttaaattagaaaatattctctatttgaattatttctgtcacagtaaaaataaaatactttgagttttgagctactggattcttattagttccccaaatacaaagttagagaactaaactagtttttcctatcatgttaacctctgcttttatctcagatgttaaaataaatggtttggtgctttttataaaaagataatctcagtgctttcctccttcactgtttcatctaagtgcctcacatttttttctacctataacactctaggatgtatattttatataaagtattctttttcttttttaaattaatatctttctgcacacaaatattatttgtgtttcctaaatccaaccaattttcattaattcaggcatattttaactccactgcttacctactttcttcaggtaaaagggcaaataatgatcgaaaaaataattatttattacataatttagttgtttctagactataaatgttgctatgtgccttatgttgaaaaaatttaaaagtaaaatgtctttccaaattatttcttaattattataaaaatattaagacaatagcacttaaattcctcaacagtgttttcagaagaaataaatataccactctttacctttattgatatctccatgatgatagttgaatgttgcaatgtgaaaaatctgctgttaactgcaaccttgtttattaaattgcaagaagctttatttctagctttttaattaagcaaagcacccatttcaatgtgtataaattgtctttaaaaactgttttagacctataatccttgataatatattgtgttgactttataaatttcgcttcttagaacagtggaaactatgtgtttttctcatatttgaggagtgttaagattgcagatagcaaggtttggtgcaaagtattgtaatgagtgaattgaatggtgcattgtatagatataatgaacaaaattatttgtaagatatttgcagtttttcattttaaaaagtccataccttatatatgcacttaatttgttggggctttacatactttatcaatgtgtctttctaagaaatcaagtaatgaatccaactgcttaaagttggtattaataaaaagacaaccacatagttcgtttaccttcaaactttaggtttttttaatgatatactgatcttcattaccaataggcaaattaatcaccctaccaactttactgtcctaacatggactttcaaaaagaaaaaatgacaccatcttttattctttttttttttttttttttgagagagagtcttactctgccgcccaaactggagtgcagtggcacaatcttggctcactgcaacctctacctcctgggttcaagtgattctcttgcctcagcctcccgagttgctgggattgcgggcatggtggcgtgagcctgtagtcctagctactcgggaggctgaggcaggagaatagcctgaacctgggaatcggaggttgcagggccaagatcgccccactgcactccagcctggcaatagaccgagctccgtctccaaaaaaaaaaatacaatttttatttcttttactttttttagtaagttaatgtatataaaaatggcttcggacaaaatatctctgagttctgtgtattttcagtcaaaactttaaacctgtagaatcaatttaagtgttgaaaaaaatttgtctgaaacatttcataatttgtttccagcatgaggtatctaaggatttagaccagaggtctagattaatactctatttttacatttaaaccttttattataagtcttacataaaccatttttgttactctcttccacatgttactggataaattgtttagtggaaaataggctttttaatcatgaatatgatgacaatcagttatacagttataaaattaaaagtttgaaaagcaatattgtatatttttatctatataaaataactaaaatgtatctaagaataataaaatcacgttaaacc

SEQ ID NO: 1402 - DNA, 1733 bp; single-stranded, linear
  immediate source library: GENBANK
  immediate source clone: g425147
tgatttcctctgggcaggagggagccacggccagcgcgtgtcacacttcatggctcttactccacctctcttgctcctctctgcagggaccatgaccttgggctcccccaggaaaggccttctgatgctgctgatggccttggtgacccagggagaccctgtgaagccgtctcggggcccgctggtgacctgcacgtgtgagagcccacattgcaaggggcctacctgccggggggcctggtgcacagtagtgctggtgcgggaggaggggaggcacccccaggaacatcggggctgcgggaacttgcacagggagctctgcagggggcgccccaccgagttcgtcaaccactactgctgcgacagccacctctgcaaccacaacgtgtccctggtgctggaggccacccaacctccttcggagcagccgggaacagatggccagctggccctgatcctgggccccgtgctggccttgctggccctggtggccctgggtgtcctgggcctgtggcatgtccgacggaggcaggagaagcagcgtggcctgcacagcgagctgggagagtccagtctcatcctgaaagcatctgagcagggcgacagcatgttgggggacctcctggacagtgactgcaccacagggagtggctcagggctccccttcctggtgcagaggacagtggcacggcaggttgccttggtggagtgtgtgggaaaaggccgctatggcgaagtgtggcggggcttgtggcacggtgagagtgtggccgtcaagatcttctcctcgagggatgaacagtcctggttccgggagactgagatctataacacagtgttgctcagacacgacaacatcctaggcttcatcgcctcagacatgacctcccgcaactcgagcacgcagctgtggctcatcacgcactaccacgagcacggctccctctacgactttctgcagagacagacgctggagccccatctggctctgaggctagctgtgtccgcggcatgcggcctggcgcacctgcacgtggagatcttcggtacacagggcaaaccagccattgcccaccgcgacttcaagagccgcaatgtgctggtcaagagcaacctgcagtgttgcatcgccgacctgggcctggctgtgatgcactcacagggcagcgattacctggacatcggcaacaacccgagagtgggcaccaagcggtacatggcacccgaggtgctggacgagcagatccgcacggactgctttgagtcctacaagtggactgacatctgggcctttggcctggtgctgtgggagattgcccgccggaccatcgtgaatggcatcgtggaggactatagaccacccttctatgatgtggtgcccaatgaccccagctttgaggacatgaagaaggtggtgtgtgtggatcagcagacccccaccatccctaaccggctggctgcagacccggtcctctcaggcctagctcagatgatgcgggagtgctggtacccaaacccctctgcccgactcaccgcgctgcggatcaagaagacactacaaaaaattagcaacagtccagagaagcctaaagtgattcaatagcccaggagcacctgattcctttctgcctgcagggggctgggggggtggggggcagcggatggtgcctatctgggtagaggtagtgtgagtgtgtgtgtgctgggatggcagctgcgcctgctgctcgccc

SEQ ID NO: 1403 - DNA, 1724 bp; single-stranded, linear
  immediate source library: GENBANK
  immediate source clone: g431327
gctcctgcaacacagcagcaatggcaatttggcggacttctgcgctgggccagcgtatagctcttactccacactcaccggcagccttacgatgaacgataatagaaggattcaaatgctagcagacacggtggctactctgcctcggggacgaaagcagcttgctttgaccagatcaagttctttaagtgacttttcctggtctcaaagaaagcttgttactgtggagaagcaggataatgaaacatttggatttgaaattcagtcttacaggccccagaatcagaatgcctgctcctcggaaatgttcactttgatatgcaaaatacaggaggacagcccagctcactgtgctggcctgcaagctggtgatgtccttgcaaatatcaatggtgtgagcacagaaggttttacctacaaacaagtcgttgacctgatcagatcgtccggaaacctgctaacgatagagactcttaatggaacaatgattctgaaaagaacggagcttgaagcaaagctgcaggttttaaagcaaactttgaaacaaaaatgggtggagtacagatctctgcagttacaggaacatcgtctgcttcatggtgatgcagctaattgccccagtttggaaaacatggacttggatgaattgtctttgtttggacccctgcctgggccaggcccagcccttgtggaccggaatcgattatccagtgagagcagctgtaagagctggctgagctccatgacgatggacagtgaagatggctaccagacgtgtgtgtctgaggactccagcaggggtgccttcagtcggcagcagagtacagatgatgagtgctttatccccaaggagggggatgattttctgaggaggtcatcttcaaggaggaaccggagcatcagtaacaccagcagcggatccatgtctcccttgtgggagggcaacttatcaagcatgtttgggaccctgccccggaagagcagaaagggaagtgtccgaagagttgctttgaaatttatccctggccttcatcgtgctgtggaagaggaagaaagtcgcttttgacggattgtggtgtcctttcaaattagcttatttcacaaatatctctagactcacccagatcccagcttggtgggaaagtgcagaagaattgcaaaactgacatcccatttcacagcaatagtgacctttatttaaattgttgtgttatagtttatgcttcttaaatcatttttcaacctaaacagccaatttctaagcagacaggaaaactaaataataagttaattaatataacaaagatgcaggttcctgctcattccagtaatgtctttgaaagcaaaactaatatttattttctagattatccctgtgaataattgagaactttttggagtcaagtatgaataaaggtgtggcagaatataataatctggactattttctataggataattgctgggttataaaatcttaggtttgcttatgcccagtagctcctgcggaggcttaataataggcaattttgaatttgttcaaacctgtaatggcttgtaaacaaagatgaccatcagctgtttctcacatctatagtgacaataaagcgggaagtataagatttaataggaggggttaaggttcatgagaaccatggaaagatgtggtctgagatgggtgctgcaaagatcataataaagtcatttttatagacagtctaaac

SEQ ID NO: 1404 - DNA, 1176 bp; single-stranded, linear
  immediate source library: GENBANK
  immediate source clone: g433494
tgcaagtgttattcgacaaaagcaattatgctaatttccttccctgtggctcaattccttttttgacacgatgacttggaggagtcattatgattactccaaacaggaaagacactcgcccagctgtccgcccgcagagagctggctacggtgcagaaagctgaggaggcgtctggagtttttgggtgttaatgattctgcctgcccacaggtcgggtcttggggtctggagcgtttgggaaggtggttgaaggaacagcctatggattaagccggtcccaacctgtcatgaaagttgcagtgaagatgctaaaacccacggccagatccagtgaaaaacaagctctcatgtctgaactgaagataatgactcacctggggccacatttgaacattgtaaacttgctgggagcctgcaccaagtcaggccccatttacatcatcacagagtattgcttctatggagatttggtcaactatttgcataagaatagggatagcttcctgagccaccacccagagaagccaaagaaagagctggatatctttggattgaaccctgctgatgaaagcacacggagctatgttattttatcttttgaaaacaatggtgactacatggacatgaagcaggctgatactacacagtatgtccccatgctagaaaggaaagaggtttctaaatattccgacatccagagatcactctatgatcgtccagcctcatataagaagaaatctatgttaggctgggctggtggagttggcacgagatgtcagaggaacctgagtcatgctcaggcccaagccctgttggcaggcagaccactgctttctggccttccgtgactatctgaaaaaaatcgtgaatggctagagctactcttcacttgctgaacattttcaaaaagaattgacacttgctgaacatttcttttcaattcagaacttctgatggattaaattgccttcttcctcgaaaaccctgggacccttccagatgggactaactggggaaagtggacaagttacaaacaaagaaactcaaaggaaagtcattggcactgatctctaagatgctatcacatgtgattggtggttgattttattaacaaattataagcaaagtactacaaaggtggctttaaaaagaaaataaagcaattcacagaaact

SEQ ID NO: 1405 - DNA, 1599 bp; single-stranded, linear
  immediate source library: GENBANK
  immediate source clone: g438625
ccagcccagcaaacagcagcactcagctaaaaggaagactcacagaacacagttgaagaaggaaagtggcgatggacctcatcccaaatttggcggtggaaacctggcttctcctggctgtcagcctggtgctcctctatctatatgggacccgtacacatggactttttaagagactgggaattccagggcccacacctctgcctttgttgggaaatgttttgtcctatcgtcagggtctctggaaatttgacacagagtgctataaaaagtatggaaaaatgtggggtacgtcttccctgtttggaccacattacccttcatcatatgaagccttgggtggctcctgtgtgagactcttgctgtgtgtcacaccctaatgaactagaacctaaggttgctgtgtgtcgtacaactagggaacgtatgaaggtcaactccctgtgctggccatcacagatcccgacgtgatcagaacagtgctagtgaaagaatgttattctgtcttcacaaatcgaaggatttgtgcaacgaccagcaccatcaagatgcagacccattccgtcaccatgtggctccctcctgctgtcctacagtcacaacatggagtttgtctttttctctgacagtctttaggcccagtgggatttatgaaaagtgccatctctttagctgaggatgaagaatggaagagaatacggtcattgctgtctccaaccttcaccagcggaaaactcaaggagaaaagacatcacaaaattcattacaaaatgtcacttactgctccatgctggagaaagccatatccttctgggacttgagtctgcacatttaactacagcatctttggggcctacagcatggatgtgattactggcacatcatttggagtgaacatcgactctctcaacaatccacaagacccctttgtggagagcactaagaagttcctaaaatttggtttcttagatccattatttctctcaataatactctttccattccttaccccagtttttgaagcattaaatgtctctctgtttccaaaagataccataaattttttaagtaaatctgtaaacagaatgaagaaaagtcgcctcaacgacaaacaaaagcaccgactagatttccttcagctgatgattgactcccagaattcgaaagaaactgagtcccacaaagctctgtctgatctggagctcgcagcccagtcaataatcttcatttttgctggctatgaaaccaccagcagtgttctttccttcactttatatgaactggccactcaccctgatgtccagcagaaactgcaaaaggagattgatgcagttttgcccaataaggtgaggggatgacccctggagatgaagggaagaggtgaagccttagcaaaaatgcctcctcaccactccccaggagaatttttataaaaagcataatcactgattccttcactgacataatgtaggaagcctctgaggagaaaaacaaagggagaaacatagagaacggttgctactggcagaagcataagatctttgtacaatattgctggccctggttcacctgtttactgttatcacaataatgctaagt

SEQ ID NO: 1406 - DNA, 1051 bp; single-stranded, linear
  immediate source library: GENBANK
  immediate source clone: g439225
tcaagcatggctgaccaggcgcccttcgacacggacgtcaacaccctgacccgcttcgtcatggaggagggcaggaaggcccgcggcacgggcgagttgacccagctgctcaactcgctctgcacagcagtcaaagccatctcttcggcggtgcgcaaggcgggcatcgcgcacctctatggcattgctggttctaccaacgtgacaggtgatcaagttaagaagctggacgtcctctccaacgacctggttatgaacatgttaaagtcatcctttgccacgtgtgttctcgtgtcagaagaagataaacacgccatcatagtggaaccggagaaaaggggtaaatatgtggtctgttttgatccccttgatggatcttccaacatcgattgccttgtgtccgttggaaccatttttggcatctatagaaagaaatcaactgatgagccttctgagaaggatgctctgcaaccaggccggaacctggtggcagccggctacgcactgtatggcagtgccaccatgctggtccttgccatggactgtggggtcaactgcttcatgctggacccggccatcggggagttcattttggtggacaaggatgtgaagataaaaaagaaaggtaaaatctacagccttaacgagggctacgccaaggactttgaccctgccgtcactgagtacatccagaggaagaagttccccccagataattcagctccttatggggcccggtatgtgggctccatggtggctgatgttcatcgcactctggtctacggagggatatttctgtaccccgctaacaagaagagccccaatggaaagctgagactgctgtacgaatgcaaccccatggcctacgtcatggagaaggctgggggaatggccaccactgggaaggaggccgtgttagacgtcattcccacagacattcaccagagggcgccggtgatcttggggtcccccgacgacgtgctcgagttcctgaaggtgtatgagaagcactctgcccagtgagcacctgccctgcctgcatccggagaat

SEQ ID NO: 1407 - DNA, 4164 bp; single-stranded, linear
  immediate source library: GENBANK
  immediate source clone: g441452
agagaactcagcctcattcctgctttaaaatctctcggccacctttgatgaggggactgggcagttctagacagtcccgaagttctcaaggcacaggtctcttcctggtttgactgtccttaccccggggaggcagtgcagccagctgcaagccccacagtgaagaacatctgagctcaaatccagataagtgacataagtgacctgctttgtaaagccatagagatggcctgtccttggaaatttctgttcaagaccaaattccaccagtatgcaatgaatggggaaaaagacatcaacaacaatgtggagaaagccccctgtgccacctccagtccagtgacacaggatgaccttcagtatcacaacctcagcaagcagcagaatgagtccccgcagcccctcgtggagacgggaaagaagtctccagaatctctggtcaagctggatgcaaccccattgtcctccccacggcatgtgaggatcaaaaactggggcagcgggatgactttccaagacacacttcaccataaggccaaagggattttaacttgcaggtccaaatcttgcctggggtccattatgactcccaaaagtttgaccagaggacccagggacaagcctacccctccagatgagcttctacctcaagctatcgaatttgtcaaccaatattacggctccttcaaagaggcaaaaatagaggaacatctggccagggtggaagcggtaacaaaggagatagaaacaacaggaacctaccaactgacgggagatgagctcatcttcgccaccaagcaggcctggcgcaatgccccacgctgcattgggaggatccagtggtccaacctgcaggtcttcgatgcccgcagctgttccactgcccgggaaatgtttgaacacatctgcagacacgtgcgttactccaccaacaatggcaacatcaggtcggccatcaccgtgttcccccagcggagtgatggcaagcacgacttccgggtgtggaatgctcagctcatccgctatgctggctaccagatgccagatggcagcatcagaggggaccctgccaacgtggaattcactcagctgtgcatcgacctgggctggaagcccaagtacggccgcttcgatgtggtccccctggtcctgcaggccaatggccgtgaccctgagctcttcgaaatcccacctgaccttgtgcttgaggtggccatggaacatcccaaatacgagtggtttcgggaactggagctaaagtggtacgccctgcctgcagtggccaacatgctgcttgaggtgggcggcctggagttcccagggtgccccttcaatggctggtacatgggcacagagatcggagtccgggacttctgtgacgtccagcgctacaacatcctggaggaagtgggcaggagaatgggcctggaaacgcacaagctggcctcgctctggaaagaccaggctgtcgttgagatcaacattgctgtgctccatagtttccagaagcagaatgtgaccatcatggaccaccactcggctgcagaatccttcatgaagtacatgcagaatgaataccggtcccgtgggggctgcccggcagactggatttggctggtccctcccatgtctgggagcatcacccccgtgtttcaccaggagatgctgaactacgtcctgtcccctttctactactatcaggtagaggcctggaaaacccatgtctggcaggacgagaagcggagacccaagagaagagagattccattgaaagtcttggtcaaagctgtgctctttgcctgtatgctgatgcgcaagacaatggcgtcccgagtcagagtcaccatcctctttgcgacagagacaggaaaatcagaggcgctggcctgggacctgggggccttattcagctgtgccttcaaccccaaggttgtctgcatggataagtacaggctgagctgcctggaggaggaacggctgctgttggtggtgaccagtacgtttggcaatggagactgccctggcaatggagagaaactgaagaaatcgctcttcatgctgaaagagctcaacaacaaattcaggtacgctgtgtttggcctcggctccagcatgtaccctcggttctgcgcctttgctcatgacattgatcagaagctgtcccacctgggggcctctcagctcaccccgatgggagaaggggatgagctcagtgggcaggaggacgccttccgcagctgggccgtgcaaaccttcaaggcagcctgtgagacgtttgatgtccgaggcaaacagcacattcagatccccaagctctacacctccaatgtgacctgggacccgcaccactacaggctcgtgcaggactcacagcctttggacctcagcaaagccctcagcagcatgcatgccaagaacgtgttcaccatgaggctcaaatctcggcagaatctacaaagtccgacatccagccgtgccaccatcctggtggaactctcctgtgaggatggccaaggcctgaactacctgccgggggagcaccttggggtttgcccaggcaaccagccggccctggtccaaggtatcctggagcgagtggtggatggccccacaccccaccagacagtgcgcctggaggccctggatgagagtggcagctactgggtcagtgacaagaggctgcccccctgctcactcagccaggccctcacctacttcctggacatcaccacacccccaacccagctgctgctccaaaagctggcccaggtggccacagaagagcctgagagacagaggctggaggccctgtgccagccctcagagtacagcaagtggaagttcaccaacagccccacattcctggaggtgctagaggagttcccgtccctgcgggtgtctgctggcttcctgctttcccagctccccattctgaagcccaggttctactccatcagctcctcccgggatcacacgcccacagagatccacctgactgtggccgtggtcacctaccacacccgagatggccagggtcccctgcaccacggcgtctgcagcacatggctcaacagcctgaagccccaagacccagtgccctgctttgtgcggaatgccagcggcttccacctccccgaggatccctcccatccttgcatcctcatcgggcctggcacaggcatcgcgcccttccgcagtttctggcagcaacggctccatgactcccagcacaagggagtgcggggaggccgcatgaccttggtgtttgggtgccgccgcccagatgaggaccacatctaccaggaggagatgctggagatggcccagaagggggtgctgcatgcggtgcacacagcctattcccgcctgcctggcaagcccaaggtctatgttcaggacatcctgcggcagcagctggccagcgaggtgctccgtgtgctccacaaggagccaggccacctctatgtttgcggggatgtgcgcatggcccgggacgtggcccacaccctgaagcagctggtggctgccaagctgaaattgaatgaggagcaggtcgaggactatttctttcagctcaagagccagaagcgctatcacgaagatatctttggtgctgtatttccttacgaggcgaagaaggacagggtggcggtgcagcccagcagcctggagatgtcagcgctctgagggcctacaggaggggttaaagctgccggcacagaacttaaggatggagccagctctgcattatctgaggtcacagggcctggggagatggaggaaagtgatatcccccagcctcaagtcttatttcctcaacgttgctccccatcaagccctttacttgacctcctaacaagtagcaccctggattgatcggagcctcctctctcaaactggggcctccctggtcccttggagacaaaatcttaaatgccaggcctggcaagtgggtgaaagatggaacttgctgctgagtgcaccacttcaagtgaccaccaggaggtgctatcgcaccactgtgtatttaactgccttgtgtacagttatttatgcctctgtatttaaaaaactaacacccagtctgttccccatggccacttgggtcttccctgtatgattccttgatggagatatttacatgaattgcattttactttaatc

SEQ ID NO: 1408 - DNA, 2566 bp; single-stranded, linear
  immediate source library: GENBANK
  immediate source clone: g453368
ggcacgagttgtgctcctcgcttgcctgttccttttccacgcattttccaggataactgtgactccaggcccgcaatggatgccctgcaactagcaaattcggcttttgccgttgatctgttcaaacaactatgtgaaaaggagccactgggcaatgtcctcttctctccaatctgtctctccacctctctgtcacttgctcaagtgggtgctaaaggtgacactgcaaatgaaattggacaggttcttcattttgaaaatgtcaaagatataccctttggatttcaaacagtaacatcggatgtaaacaaacttagttccttttactcactgaaactaatcaagcggctctacgtagacaaatctctgaatctttctacagagttcatcagctctacgaagagaccctatgcaaaggaattggaaactgttgacttcaaagataaattggaagaaacgaaaggtcagatcaacaactcaattaaggatctcacagatggccactttgagaacattttagctgacaacagtgtgaacgaccagaccaaaatccttgtggttaatgctgcctactttgttggcaagtggatgaagaaatttcctgaatcagaaacaaaagaatgtcctttcagactcaacaagacagacaccaaaccagtgcagatgatgaacatggaggccacgttctgtatgggaaacattgacagtatcaattgtaagatcatagagcttccttttcaaaataagcatctcagcatgttcatcctactacccaaggatgtggaggatgagtccacaggcttggagaagattgaaaaacaactcaactcagagtcactgtcacagtggactaatcccagcaccatggccaatgccaaggtcaaactctccattccaaaatttaaggtggaaaagatgattgatcccaaggcttgtctggaaaatctagggctgaaacatatcttcagtgaagacacatctgatttctctggaatgtcagagaccaagggagtggccctatcaaatgttatccacaaagtgtgcttagaaataactgaagatggtggggattccatagaggtgccaggagcacggatcctgcagcacaaggatgaattgaatgctgaccatccctttatttacatcatcaggcacaacaaaactcgaaacatcattttctttggcaaattctgttctccttaagtggcatagcccatgttaagtcctccctgacttttctgtggatgccgatttctgtaaactctgcatccagagattcattttctagatacaataaattgctaatgttgctggatcaggaagccgccagtacttgtcatatgtagccttcacacagatagacctttttttttttccaattctatcttttgtttccttttttcccataagacaatgacatacgcttttaatgaaaaggaatcacgttagaggaaaaatatttattcattatttgtcaaattgtccggggtagttggcagaaatacagtcttccacaaagaaaattcctataaggaagatttggaagctcttcttcccagcactatgctttccttctttgggatagagaatgttccagacattctcgcttccctgaaagactgaagaaagtgtagtgcatgggacccacgaaactgccctggctccagtgaaacttgggcacatgctcaggctactataggtccagaagtccttatgttaagccctggcaggcaggtgtttattaaaattctgaattttggggattttcaaaagataatattttacatacactgtatgttatagaacttcatggatcagatctggggcagcaacctataaatcaacaccttaatatgctgcaacaaaatgtagaatattcagacaaaatggatacataaagactaagtagcccataaggggtcaaaatttgctgccaaatgcgtatgccaccaacttacaaaaacacttcgttcgcagagcttttcagattgtggaatgttggataaggaattatagacctctagtagctgaaatgcaagaccccaagaggaagttcagatcttaatataaattcactttcatttttgatagctgtcccatctggtcatgtggttggcactagactggtggcaggggcttctagctgactcgcacagggattctcacaatagccgatatcagaatttgtgttgaaggaacttgtctcttcatctaatatgatagcgggaaaaggagaggaaactactgcctttagaaaatataagtaaagtgattaaagtgctcacgttaccttgacacatagtttttcagtctatgggtttagttactttagatggcaagcatgtaacttatattaatagtaatttgtaaagttgggtggataagctatccctgttgccggttcatggattacttctctataaaaaatatatatttaccaaaaaattttgtgacattccttctcccatctcttccttgacatgcattgtaaataggttcttcttgttctgagattcaatattgaatttctcctatgctattgacaataaaatattattgaactacc

SEQ ID NO: 1409 - DNA, 1987 bp; single-stranded, linear
  immediate source library: GENBANK
  immediate source clone: g455449
ggagcaactcgctccaagttgtgcagccgggaccgcctcggggtgtgcagccggctcgcggaggccctcctgggggcgggcggggcgcggctcgggggcgccccctgagcagaaaacaggaagaaccaggctcggtccagtggcacccagctccctacctcctgtgccagccgcctggcctgtggcaggccattcccagcgtccccgactgtgaccacttgctcagtgtgcctctcacctgcctcagtttcctctgggggcgatggcggggcgaggctctctggtttcctggcgggcatttcacggctgtgattctgctgaggaacttccccgggtgagcccccgcttcctccgagcctggcacccccctcccgtctcagccaggatgccaacgaggcgctgggccccgggcacccagtgtatcaccaaatgcgagcacacccgccccaagccaggggagctggccttccgcaagggcgacgtggtcaccatcctggaggcctgcgagaacaagagctggtaccgcgtcaagcaccacaccagtggacaggaggggctgctggcagctggggcgctgcgggacggggaggccctctccgcagaccccaagctcagcctcatgccgtggttccacgggaagatctcgggccaggaggctgtccagcagctgcagcctcccgaggatgggctgttcctggtgcgggagtccgcgcgccaccccggcgactacgtcctgtgcgtgagctttggccgcgacgtcatccactaccgcgtgctgcaccgcgacggccacctcacaatcgatgaggccgtgttcttctgcaacctcatggacatggtggagcattacagcaaggacaagggcgctatctgcaccaagctggtgagaccaaagcggaaacacgggaccaagtcggccgaggaggagctggccagggcgggctggttactgaacctgcagcatttgacattgggagcacagatcggagagggagagtttggagctgtcctgcagggtgagtacctggggcaaaaggtggccgtgaagaatatcaagtgtgatgtgacagcccaggccttcctggacgagacggccgtcatgacgaagatgcaacacgagaacctggtgcgtctcctgggcgtgatcctgcaccaggggctgtacattgtcatggagcacgtgagcaagggcaacctggtgaactttctgcggacccggggtcgagccctcgtgaacaccgctcagctcctgcagttttctctgcacgtggccgagggcatggagtacctggagagcaagaagcttgtgcaccgcgacctggccgcccgcaacatcctggtctcagaggacctggtggccaaggtcagcgactttggcctggccaaagccgagcggaaggggctagactcaagccggctgcccgtcaagtggacggcgcccgaggctctcaaacacgggttcaccagcaagtcggatgtctggagttttggggtgctgctctgggaggtcttctcatatggacgggctccgtaccctaaaatgtcactgaaagaggtgtcggaggccgtggagaaggggtaccgcatggaaccccccgagggctgtccaggccccgtgcacgtcctcatgagcagctgctgggaggcagagccgcccgccggccacccttccgcaaactggccgagaagctggcccgggagctacgcagtgcaggtgccccagcctccgtctcagggcaggacgccgacggtccacctcgccccgaagccaggagccctgaccccacccggtggcccttggccccagaggaccgagagagtggagagtgcggcgtgggggcactgaccaggcccaaggagggtccaggcgggcaagtcatcctcctggtgcccacagcaggggctggcccacgtagggggctctgggcggcccgtggacaccccagacctgcgaaggatgatcgcccgataaagacggattctaagg

SEQ ID NO: 1410 - DNA, 2247 bp; single-stranded, linear
  immediate source library: GENBANK
  immediate source clone: g456256
ccggggcggatggctccggccgcctggctccgcagcgcggccgcgcgcgccctcctgcccccgatgctgctgctgctgctccagccgccgccgctgctggcccgggctctgccgccggacgtccaccacctccatgccgagaggagggggccacagccctggcatgcagccctgcccagtagcccggcacctgcccctgccacgcaggaagccccccggcctgccagcagcctcaggcctccccgctgtggcgtgcccgacccatctgatgggctgagtgcccgcaaccgacagaagaggttcgtgctttctggcgggcgctgggagaagacggacctcacctacaggatccttcggttcccatggcagttggtgcaggagcaggtgcggcagacgatggcagaggccctaaaggtatggagcgatgtgacgccactcacctttactgaggtgcacgagggccgtgctgacatcatgatcgacttcgccaggtactggcatggggacgacctgccgtttgatgggcctgggggcatcctggcccatgccttcttccccaagactcaccgagaaggggatgtccacttcgactatgatgagacctggactatcggggatgaccagggcacagacctgctgcaggtggcagcccatgaatttggccacgtgctggggctgcagcacacaacagcagccaaggccctgatgtccgccttctacacctttcgctacccactgagtctcagcccagatgactgcaggggcgttcaacacctatatggccagccctggcccactgtcacctccaggaccccagccctgggcccccaggctgggatagacaccaatgagattgcaccgctggagccagacgccccgccagatgcctgtgaggcctcctttgacgcggtctccaccatccgaggcgagctctttttcttcaaagcgggctttgtgtggcgcctccgtgggggccagctgcagcccggctacccagcattggcctctcgccactggcagggactgcccagccctgtggacgctgccttcgaggatgcccagggccacatttggttcttccaaggtgctcagtactgggtgtacgacggtgaaaagccagtcctgggccccgcacccctcaccgagctgggcctggtgaggttcccggtccatgctgccttggtctggggtcccgagaagaacaagatctacttcttccgaggcagggactactggcgtttccaccccagcacccggcgtgtagacagtcccgtgccccgcagggccactgactggagaggggtgccctctgagatcgacgctgccttccaggatgctgatggctatgcctacttcctgcgcggccgcctctactggaagtttgaccctgtgaaggtgaaggctctggaaggcttcccccgtctcgtgggtcctgacttctttggctgtgccgagcctgccaacactttcctctgaccatggcttggatgccctcaggggtgctgacccctgccaggccacgaatatcaggctagagacccatggccatctttgtggctgtgggcaccaggcatgggactgagcccatgtctcctgcagggggatggggtggggtacaaccaccatgacaactgccgggagggccacgcaggtcgtggtcacctgccagcgactgtctcagactgggcagggaggctttggcatgacttaagaggaagggcagtcttgggacccgctatgcaggtcctggcaaacctggctgccctgtctcatccctgtccctcagggtagcaccatggcaggactgggggaactggagtgtccttgctgtatccctgttgtgaggttccttccaggggctggcactgaagcaagggtgctggggccccatggccttcagccctggctgagcaactgggctgtagggcagggccacttcctgaggtcaggtcttggtaggtgcctgcatctgtctgccttctggctgacaatcctggaaatctgttctccagaatccaggccaaaaagttcacagtcaaatggggaggggtattcttcatgcaggagaccccaggccctggaggctgcaacatacctcaatcctgtcccaggccggatcctcctgaagcccttttcgcagcactgctatcctccaaagccattgtaaatgtgtgtacagtgtgtataaaccttcttcttcttttttttttttaaactgaggattgtcattaaacacagttgttttct

SEQ ID NO: 1411 - DNA, 1413 bp; single-stranded, linear
  immediate source library: GENBANK
  immediate source clone: g456426
agccctcccagtttccgcgcgcgtctttggcagctggtcacatggtgagggtgggggtgagggggcctctctagcttgcggcctgtgtctatggtcgggccctctgcgtccagctgctccggaccgagctcgggtgtatggggccgtaggaaccggctccggggccccgataacgggccgcccccacagcaccccgggctggcgtgagggtctcccttgatctgagaatggctacctctcgatatgagccagtggctgaaattggtgtcggtgcctatgggacagtgtacaaggcccgtgatccccacagtggccactttgtggccctcaagagtgtgagagtccccaatggaggaggaggtggaggaggccttcccatcagcacagttcgtgaggtggctttactgaggcgactggaggcttttgagcatcccaatgttgtccggctgatggacgtctgtgccacatcccgaactgaccgggagatcaaggtaaccctggtgtttgagcatgtagaccaggacctaaggacatatctggacaaggcacccccaccaggcttgccagccgaaacgatcaaggatctgatgcgccagtttctaagaggcctagatttccttcatgccaattgcatcgttcaccgagatctgaagccagagaacattctggtgacaagtggtggaacagtcaagctggctgactttggcctggccagaatctacagctaccagatggcacttacacccgtggttgttacactctggtaccgagctcccgaagttcttctgcagtccacatatgcaacacctgtggacatgtggagtgttggctgtatctttgcagagatgtttcgtcgaaagcctctcttctgtggaaactctgaagccgaccagttgggcaaaatctttgacctgattgggctgcctccagaggatgactggcctcgagatgtatccctgccccgtggagcctttccccccagagggccccgcccagtgcagtcggtggtacctgagatggaggagtcgggagcacagctgctgctggaaatgctgacttttaacccacacaagcgaatctctgcctttcgagctctgcagcactcttatctacataaggatgaaggtaatccggagtgagcaatggagtggctgccatggaaggaagaaaagctgccatttcccttctggacactgagagggcaatctttgcctttatctctgaggctatggagggtcctcctccatctttctacagagattactttgctgccttaatgacattcccctcccacctctccttttgaggcttctccttctccttcccatttctctacactaaggggtatgttccctcttgtccctttccctacctttatatttggggtccttttttatacaggaaaaacaaaac

SEQ ID NO: 1412 - DNA, 1245 bp; single-stranded, linear
  immediate source library: GENBANK
  immediate source clone: g458543
ggggagagtctcgcccagccagtcccaggctgagttcacctctcacttcctccagccaccctgcgtctcgtctcagcctgggactggctgggcgagactctccacctgctccctgggaccatcgcccaccatggctgtggcccagcagctgcgggccgagagtgactttgaacagcttccggatgatgttgccatctcggccaacattgctgacatcgaggagaagagaggcttcaccagccactttgttttcgtcatcgaggtgaagacaaaaggaggatccaagtacctcatctaccgccgctaccgccagttccatgctttgcagagcaagctggaggagcgcttcgggccagacagcaagagcagtgccctggcctgtaccctgcccacactcccagccaaagtctacgtgggtgtgaaacaggagatcgccgagatgcggatacctgccctcaacgcctacatgaagagcctgctcagcctgccggtctgggtgctgatggatgaggacgtccggatcttcttttaccagtcgccctatgactcagagcaggtgccccaggccatccgccggctccgcccgcgcacccggaaagtcaagagcgtgtccccacagggcaacagcgttgaccgcatggcagctccgagagcagaggctctatttgacttcactggaaacagcaaactggagctgaatttcaaagctggagatgtgatcttcctcctcagtcggatcaacaaagactggctggagggcactgtccggggagccacgggcatcttccctctctccttcgtgaagatcctcaaagacttccctgaggaggacgaccccaccaactggctgcgttgctactactacgaagacaccatcagcaccatcaaggacatcgcggtggaggaagatctcagcagcactcccctattgaaagacctgctggagctcacaaggcgggagttccagagagaggacatagctctgaattaccgggacgctgagggggatctggttcggctgctgtcggatgaggacgtagcgctcatggtgcggcaggctcgtggcctcccctcccagaagcgcctcttcccctggaagctgcacatcacgcagaaggacaactacagggtctacaacacgatgccatgagctgacggtgtccctggagcagtgaggggacaccagcaaaaaccttcagctctcagaggagattgggaccaggaaaacctgggaggatgggcaga

SEQ ID NO: 1413 - DNA, 2214 bp; single-stranded, linear
  immediate source library: GENBANK
  immediate source clone: g463549
gttgactggaggcggaggttgcagtgagccgagatcgccccactgcactccagcctggtgactccgtctcaaaaaaaaggggaggggggcgggggagagttgaaagcttaatatgtactttgggggctattaaagcaaacatttcgactaaaggggcgaatcctcgaattgtgcgatcaagcacccgagaggagagttggggggggtcaggaggggtgggggctccagggaacgcccgggggcctgggccggggtctcgcggggcccttccggaaggatcgcggcccccgaaggtgggcgtcccgcggggctccagtctccaggacgttccgggaggctccgcgctctgggaggccggctgcgtggggtccccgcgctgcagccgcagaggccccccagggccgcggttcccggagcgggaaagtcccgcgcgggggcggtggcctcgggggcgggacggggcgggggcgggggcgcgggcggccgagccgaatcccctccaccgggacgccccgctgccgctcgggaagaggcgggccctgcgcgccctgcgctcgccatggcggtttgggcggcgacgtgagcggctccgcggaccccgagcggggccccggccgcgacctgagccgccgccgagcgcccggggccatgcgaccgacgctgctgtggtcgctgctgctgctgctcggagtcttcgccgccgccgccgcggccccgccagaccctctttcccagctgcccgctcctcagcacccgaagattcgcctgtacaacgcagagcaggtcctgagttgggagccagtggccctgagcaatagcacgaggcctgttgtctaccgagtgcagtttaaatacaccgacagtaaatggttcacggccgacatcatgtccataggggtgaattgtacacagatcacagcaacagagtgtgacttcactgccgccagtccctcagcaggcttcccaatggatttcaatgtcactctacgccttcgagctgagctgggagcactccattctgcctgggtgacaatgccttggtttcaacactatcggaatgtgactgtcgggcctccagaaaacattgaggtgaccccaggagaaggctccctcatcatcaggttctcctctccctttgacatcgctgatacctccacggcctttttttgttattatgtccattactgggaaaaaggaggaatccaacaggtcaaaggccctttcagaagcaactccatttcattggataacttaaaaccctccagagtgtactgtttacaagtccaggcacaactgctttggaacaaaagtaacatctttagagtcgggcatttaagcaacatatcttgctacgaaacaatggcagatgcctccactgagcttcagcaagtcatcctgatctccgtgggaacattttcgttgctgtcggtgctggcaggagcctgtttcttcctggtcctgaaatatagaggcctgattaaatactggtttcacactccaccaagcatcccattacagatagaagagtatttaaaagacccaactcagcccatcttagaggccttggacaaggacagctcaccaaaggatgacgtctgggactctgtgtccattatctcgtttccggaaaaggagcaagaagatgttctccaaacgctttgaaccaaagcatgggcctagcccactggctccctggaagagatcaagccatcggagctgctagagttctgtctggactttccagagaccagtattcccttttgctgcctctaaaaggcctgtccctgcagacatgagagacagcaggtctcatgggggtgacaagcttttttttttttttcttaaagaattttcaaaatcaaattccagaatgattttacggagatatcccaggaaaattaaggcttctcttaaacactaaaaaggcatgtaattgcttgttagcaaaatggatatgacacatctctgatacttttttcattattggttgggctgagcagtcagaagacctggtcgtcgtcttgactttggcaaatgagccggagccccttgggcaggtcacacaacctgtcccagcgagggacactgagtggcccttcatgtacatccatggtgtgctggcttaaaatgtaattaatcttgtaaatatactcctagtaatttaagattttgtttttaaactggaaataaaagattgtatagtgcatgtttttt

SEQ ID NO: 1414 - DNA, 2591 bp; single-stranded, linear
  immediate source library: GENBANK
  immediate source clone: g464186
cccggacgtgcggctcccctcggcctcctcgccatggacgcggacgactcccgggcccccaagggctccttgcggaagttcctggagcacctctccggggccggcaaggccatcggcgtgctgaccagcggcggggatgctcaaggtatgaacgctgccgtccgtgccgtggtgcgcatgggtatctacgtgggggccaaggtgtacttcatctacgagggctaccagggcatggtggacggaggctcaaacatcgcagaggccgactgggagagtgtctccagcatcctgcaagtgggcgggacgatcattggcagtgcgcggtgccaggccttccgcacgcgggaaggccgcctgaaggctgcttgcaacctgctgcagcgcggcatcaccaacctgtgtgtgatcggcggggacgggagcctcaccggggccaacctcttccggaaggagtggagtgggctgctggaggagctggccaggaacggccagatcgataaggaggccgtgcagaagtacgcctacctcaacgtggtgggcatggtgggctccatcgacaatgatttctgcggcaccgacatgaccatcggcacggactccgccctgcacaggatcatcgaggtcgtcgacgccatcatgaccacggcccagagccaccagaggaccttcgttctggaggtgatgggacgacactgtgggtacctggccctggtgagtgccttggcctgcggtgcggactgggtgttccttccagaatctccaccagaggaaggctgggaggagcagatgtgtgtcaaactctcggagaaccgtgcccggaaaaaaaggctgaatattattattgtggctgaaggagcaattgatacccaaaataaacccatcacctctgagaaaatcaaagagcttgtcgtcacgcagctgggctatgacacacgtgtgaccatcctcgggcacgtgcagagaggagggaccccttcggcattcgacaggatcttggccagccgcatgggagtggaggcagtcatcgccttgctagaggccaccccggacaccccagcttgcgtcgtgtcactgaacgggaaccacgccgtgcgcctgccgctgatggagtgcgtgcagatgactcaggatgtgcagaaggcgatggacgagaggagatttcaagatgcggttcgactccgagggaggagctttgcgggcaacctgaacacctacaagcgacttgccatcaagctgccggatgatcagatcccaaagaccaattgcaacgtagctgtcatcaacgtgggggcacccgcggctgggatgaacgcggccgtacgctcagctgtgcgcgtgggcattgccgacggccacaggatgctcgccatctatgatggctttgacggcttcgccaagggccagatcaaagaaatcggctggacagatgtcgggggctggaccggccaaggaggctccattcttgggacaaaacgcgttctcccggggaagtacttggaagagatcgccacacagatgcgcacgcacagcatcaacgcgctgctgatcatcggtggattcgaggcctacctgggactcctggagctgtcagccgcccgggagaagcacgaggagttctgtgtccccatggtcatggttcccgctactgtgtccaacaatgtgccgggttccgatttcagcatcggggcagacaccgccctgaacactatcaccgacacctgcgaccgcatcaagcagtccgccagcggaaccaagcggcgcgtgttcatcatcgagaccatgggcggctactgtggctacctggccaacatgggggggctcgcggccggagctgatgccgcatacattttcgaagagcccttcgacatcagggatctgcagtccaacgtggagcacctgacggagaaaatgaagaccaccatccagagaggccttgtgctcagaaatgagagctgcagtgaaaactacaccaccgacttcatttaccagctgtattcagaagagggcaaaggcgtgtttgactgcaggaagaacgtgctgggtcacatgcagcagggtggggcaccctctccatttgatagaaactttggaaccaaaatctctgccagagctatggagtggatcactgcaaaactcaaggaggcccggggcagaggaaaaaaatttaccaccgatgattccatttgtgtgctgggaataagcaaaagaaacgttatttttcaacctgtggcagagctgaagaagcaaacggattttgagcacaggattcccaaagaacagtggtggctcaagctacggcccctcatgaaaatcctggccaagtacaaggccagctatgacgtgtcggactcaggccagctggaacatgtgcagccctggagtgtctgacccagtcccgcctgcatgtgcctgcagccaccgtggactgtctgtttttgtaacacttaagttattttatcagcactttatgcacgtattattgacattaatacctaatcggcgagtgcccatctgccccaccagctccagtgcgtgctgtctgtggagtgtgtctcatgctttcagatgtgcatatgagcagaattaattaa

SEQ ID NO: 1415 - DNA, 5751 bp; single-stranded, linear
  immediate source library: GENBANK
  immediate source clone: g467511
ctgcttcacttcacggggcgaacatggcgcacagctgtcggtggcgcttccccgcccgacccgggaccaccgggggcggcggcggcggggggcgccggggcctagggggcgccccgcggcaacgcgtcccggccctgctgcttccccccgggcccccggtcggcggtggcggccccggggcgcccccctcccccccggctgtggcggccgcggcggcggcggcgggaagcagcggggctggggttccagggggagcggccgccgcctcagcagcctcctcgtcgtccgcctcgtcttcgtcttcgtcatcgtcctcagcctcttcagggccggccctgctccgggtgggcccgggcttcgacgcggcgctgcaggtctcggccgccatcggcaccaacctgcgccggttccgggccgtgtttggggagagcggcgggggaggcggcagcggagaggatgagcaattcttaggttttggctcagatgaagaagtcagagtgcgaagtcccacaaggtctccttcagttaaaactagtcctcgaaaacctcgtgggagacctagaagtggctctgaccgaaattcagctatcctctcagatccatctgtgttttcccctctaaataaatcagagaccaaatctggagataagatcaagaagaaagattctaaaagtatagaaaagaagagaggaagacctcccaccttccctggagtaaaaatcaaaataacacatggaaaggacatttcagagttaccaaagggaaacaaagaagatagcctgaaaaaaattaaaaggacaccttctgctacgtttcagcaagccacaaagattaaaaaattaagagcaggtaaactctctcctctcaagtctaagtttaagacagggaagcttcaaataggaaggaagggggtacaaattgtacgacggagaggaaggcctccatcaacagaaaggataaagaccccttcgggtctcctcattaattctgaactggaaaagccccagaaagtccggaaagacaaggaaggaacacctccacttacaaaagaagataagacagttgtcagacaaagccctcgaaggattaagccagttaggattattccttcttcaaaaaggacagatgcaaccattgctaagcaactcttacagagggcaaaaaagggggctcaaaagaaaattgaaaaagaagcagctcagctgcagggaagaaaggtgaagacacaggtcaaaaatattcgacagttcatcatgcctgttgtcagtgctatctcctcgcggatcattaagacccctcggcggtttatagaggatgaggattatgaccctccaattaaaattgcccgattagagtctacaccgaatagtagattcagtgccccgtcctgtggatcttctgaaaaatcaagtgcagcttctcagcactcctctcaaatgtcttcagactcctctcgatctagtagccccagtgttgatacctccacagactctcaggcttctgaggagattcaggtacttcctgaggagcggagcgatacccctgaagttcatcctccactgcccatttcccagtccccagaaaatgagagtaatgataggagaagcagaaggtattcagtgtcggagagaagttttggatctagaacgacgaaaaaattatcaactctacaaagtgccccccagcagcagacctcctcgtctccacctccacctctgctgactccaccgccaccactgcagccagcctccagtatctctgaccacacaccttggcttatgcctccaacaatccccttagcatcaccatttttgcctgcttccactgctcctatgcaagggaagcgaaaatctattttgcgagaaccgacatttaggtggacttctttaaagcattctaggtcagagccacaatacttttcctcagcaaagtatgccaaagaaggtcttattcgcaaaccaatatttgataatttccgaccccctccactaactcccgaggacgttggctttgcatctggtttttctgcatctggtaccgctgcttcagcccgattgttttcgccactccattctggaacaaggtttgatatgcacaaaaggagccctcttctgagagctccaagatttactccaagtgaggctcactctagaatatttgagtctgtaaccttgcctagtaatcgaacttctgctggaacatcttcttcaggagtatccaatagaaaaaggaaaagaaaagtgtttagtcctattcgatctgaaccaagatctccttctcactccatgaggacaagaagtggaaggcttagtagttctgagctctcacctctcacccccccgtcttctgtctcttcctcgttaagcatttctgttagtcctcttgccactagtgccttaaacccaacttttacttttccttctcattccctgactcagtctggggaatctgcagagaaaaatcagagaccaaggaagcagactagtgctccggcagagccattttcatcaagtagtcctactcctctcttcccttggtttaccccaggctctcagactgaaagagggagaaataaagacaaggcccccgaggagctgtccaaagatcgagatgctgacaagagcgtggagaaggacaagagtagagagagagaccgggagagagaaaaggagaataagcgggagtcaaggaaagagaaaaggaaaaagggatcagaaattcagagtagttctgctttgtatcctgtgggtagggtttccaaagagaaggttgttggtgaagatgttgccacttcatcttctgccaaaaaagcaacagggcggaagaagtcttcatcacatgattctgggactgatattacttctgtgactcttggggatacaacagctgtcaaaaccaaaatacttataaagaaagggagaggaaatctggaaaaaaccaacttggacctcggcccaactgccccatccctggagaaggagaaaaccctctgcctttccactccttcatctagcactgttaaacattccacttcctccataggctccatgttggctcaggcagacaagcttccaatgactgacaagagggttgccagcctcctaaaaaaggccaaagctcagctctgcaagattgagaagagtaagagtcttaaacaaaccgaccagcccaaagcacagggtcaagaaagtgactcatcagagacctctgtgcgaggaccccggattaaacatgtctgcagaagagcagctgttgcccttggccgaaaacgagctgtgtttcctgatgacatgcccaccctgagtgccttaccatgggaagaacgagaaaagattttgtcttccatggggaatgatgacaagtcatcaattgctggctcagaagatgctgaacctcttgctccacccatcaaaccaattaaacctgtcactagaaacaaggcaccccaggaacctccagtaaagaaaggacgtcgatcgaggcggtgtgggcagtgtcccggctgccaggtgcctgaggactgtggtgtttgtactaattgcttagataagcccaagtttggtggtcgcaatataaagaagcagtgctgcaagatgagaaaatgtcagaatctacaatggatgccttccaaagcctacctgcagaagcaagctaaagctgtgaaaaagaaagagaaaaagtctaagaccagtgaaaagaaagacagcaaagagagcagtgttgtgaagaacgtggtggactctagtcagaaacctaccccatcagcaagagaggatcctgccccaaagaaaagcagtagtgagcctcctccacgaaagcccgtcgaggaaaagagtgaagaagggaatgtctcggcccctgggcctgaatccaaacaggccaccactccagcttccaggaagtcaagcaagcaggtctcccagccagcactggtcatcccgcctcagccacctactacaggaccgccaagaaaagaagttcccaaaaccactcctagtgagcccaagaaaaagcagcctccaccaccagaatcaggtccagagcagagcaaacagaaaaaagtggctccccgcccaagtatccctgtaaaacaaaaaccaaaagaaaaggaaaaaccacctccggtcaataagcaggagaatgcaggcactttgaacatcctcagcactctctccaatggcaatagttctaagcaaaaaattccagcagatggagtccacaggatcagagtggactttaaggaggattgtgaagcagaaaatgtgtgggagatgggaggcttaggaatcttgacttctgttcctataacacccagggtggtttgctttctctgtgccagtagtgggcatgtagagtttgtgtattgccaagtctgttgtgagcccttccacaagttttgtttagaggagaacgagcgccctctggaggaccagctggaaaattggtgttgtcgtcgttgcaaattctgtcacgtttgtggaaggcaacatcaggctacaaagcagctgctggagtgtaataagtgccgaaacagctatcaccctgagtgcctgggaccaaactaccccaccaaacccacaaagaagaagaaagtctggatctgtaccaagtgtgttcgctgtaagagctgtggatccacaactccaggcaaagggtgggatgcacagtggtctcatgatttctcactgtgtcatgattgcgccaagctctttgctaaaggaaacttctgccctctctgtgacaaatgttatgatgatgatgactatgagagtaagatgatgcaatgtggaaagtgtgatcgctgggtccattccaaatgtgagaatctttcagatgagatgtatgagattctatctaatctgccagaaagtgtggcctacacttgtgtgaactgtactgagcggcaccctgcagagtggcgactggcccttgaaaaagagctgcagatttctctgaagcaagttctgacagctttgttgaattctcggactaccagccatttgctacgctaccggcaggctgccaagcctccagacttaaatcccgagacagaggagagtataccttcccgcagctcccccgaaggacctgatccaccagttcttactgaggtcagcaaacaggatgatcagcagcctttagatctagaaggagtcaagaggaagatggaccaagggaattacacatctgtgttggagttcagtgatgatattgtgaagatcattcaagcagccattaattcagatggaggacagccagaaattaaaaaagccaacagcatggtcaagtccttcttcattcggcaaatggaacgtgtttttccatggttcagtgtcaaaaagtccaggttttgggagccaaataaagtatcaagcaacagtgggatgttaccaaacgcagtgcttccaccttcacttgaccataattatgctcagtggcaggagcgagaggaaaacagccacactgagcagcctcctttaatgaagaaaatcattccagctcccaaacccaaaggtcctggagaaccagactcaccaactcctctgcatcctcctacaccaccaattttgagtactgataggagtcgagaagacagtccagagctgaacccacccccaggcatagaagacaatagacagtgtgcgttatgtttgacttatggtgatgacagtgctaatgatgctggtcgtttactatatattggccaaaatgagtggacacatgtaaattgtgctttgtggtcagcggaag

SEQ ID NO: 1416 - DNA, 538 bp; single-stranded, linear
  immediate source library: GENBANK
  immediate source clone: g469170
gctacactagagcagagtacgagtctgaggcggagggagtaatggcaggacaagcgtttagaaagtttcttccactctttgaccgagtattggttgaaaggagtgctgctgaaactgtaaccaaaggaggcattatgcttccagaaaaatctcaaggaaaagtattgcaagcaacagtagtcgctgttggatcgggttctaaaggaaagggtggagagattcaaccagttagcgtgaaagttggagataaagttcttctcccagaatatggaggcaccaaagtagttctagatgacaaggattatttcctatttagagatggtgacattcttggaaagtacgtagactgaaataagtcactattgaaatggcatcaacatgatgctgcccattccactgaagttctgaaatctttcgtcatgtaaataatttccatatttctcttttataataaactaatgataactaatgacatccagtgtctccaaaattgtttccttgtactgatataaacacttccaaataaaaatatgtaaat

SEQ ID NO: 1417 - DNA, 1973 bp; single-stranded, linear
  immediate source library: GENBANK
  immediate source clone: g471316
ctgccggctcactcggctgctgcgtctggtctggcgtctgctgagaagatcctcttctaccctgctctgcacctgtgctcgactgccagccggctgagggcgggggtctccacggtggtcccagctcccaaggaggttgcagaagtaccgtacagagtggatttgcagggcagtggcatggagcccctcttccccgcgccgttctgggaggttatctacggcagccaccttcagggcaacctgtccctcctgagccccaaccacagtctgctgcccccgcatctgctgctcaatgccagccacggcgccttcctgcccctcgggctcaaggtcaccatcgtggggctctacctggccgtgtgtgtcggagggctcctggggaactgccttgtcatgtacgtcatcctcaggcacaccaaaatgaagacagccaccaatatttacatctttaacctggccctggccgacactctggtcctgctgacgctgcccttccagggcacggacatcctcctgggcttctggccgtttgggaatgcgctgtgcaagacagtcattgccattgactactacaacatgttcaccagcaccttcaccctaactgccatgagtgtggatcgctatgtagccatctgccaccccatccgtgccctcgacgtccgcacgtccagcaaagcccaggctgtcaatgtggccatctgggccctggcctctgttgtcggtgttcccgttgccatcatgggctcggcacaggtcgaggatgaagagatcgagtgcctggtggagatccctacccctcaggattactggggcccggtgtttgccatctgcatcttcctcttctccttcatcgtccccgtgctcgtcatctctgtctgctacagcctcatgatccggcggctccgtggagtccgcctgctctcgggctcccgagagaaggaccggaacctgcggcgcatcactcggctggtgctggtggtagtggctgtgttcgtgggctgctggacgcctgtccaggtcttcgtgctggcccaagggctgggggttcagccgagcagcgagactgccgtggccattctgcgcttctgcacggccctgggctacgtcaacagctgcctcaaccccatcctctacgccttcctggatgagaacttcaaggcctgcttccgcaagttctgctgtgcatctgccctgcgccgggacgtgcaggtgtctgaccgcgtgcgcagcattgccaaggacgtggccctggcctgcaagacctctgagacggtaccgcggcccgcatgactaggcgtggacctgcccatggtgcctgtcagcccgcagagcccatctacgcccaacacagagctcacacaggtcactgctctctaggcggacacaccctgggccctgagcatccagagcctgggatgggcttttccctgtgggccagggatgctcggtcccagaggaggacctagtgacatcatgggacaggtcaaagcattagggccacctccatggccccagacagactaaagctgccctcctggtgcagggccgaggggacacaaggacctacctggaagcagctgacatgctggtggacggccgttactggagcccgtgcccctccctccccgtgcttcatgtgactcttggcctctctgctgctgcgttggcagaaccctgggtgggcaggcacccggaggaggagcagcagctgtgtcatcctgtgccccccatgtgctgtgtgctgtttgcatggcagggctccagctgccttcagccctgtgacgtctcctcagggcagctggacaggcttggcacggcccgggaagtgcagcaggcagcttttctttggggtgggacttgccctgagcttggagctgccacctggaggacttgcctgttccgactccacctgtgcagccggggccaccccaggagaaagtgtccaggtgggggctggcagtccctggctgcag

SEQ ID NO: 1418 - DNA, 2232 bp; single-stranded, linear
  immediate source library: GENBANK
  immediate source clone: g472555
ggattgaacaaggacgcatttccccagtacatccacaacatgctgtccacatctcgttctcggtttatcagaaataccaacgagagcggtgaagaagtcaccaccttttttgattatgattacggtgctccctgtcataaatttgacgtgaagcaaattggggcccaactcctgcctccgctctactcgctggtgttcatctttggttttgtgggcaacatgctggtcgtcctcatcttaataaactgcaaaaagctgaagtgcttgactgacatttacctgctcaacctggccatctctgatctgctttttcttattactctcccattgtgggctcactctgctgcaaatgagtgggtctttgggaatgcaatgtgcaaattattcacagggctgtatcacatcggttattttggcggaatcttcttcatcatcctcctgacaatcgatagatacctggctattgtccatgctgtgtttgctttaaaagccaggacggtcacctttggggtggtgacaagtgtgatcacctggttggtggctgtgtttgcttctgtcccaggaatcatctttactaaatgccagaaagaagattctgtttatgtctgtggcccttattttccacgaggatggaataatttccacacaataatgaggaacattttggggctggtcctgccgctgctcatcatggtcatctgctactcgggaatcctgaaaaccctgcttcggtgtcgaaacgagaagaagaggcatagggcagtgagagtcatcttcaccatcatgattgtttactttctcttctggactccctataacattgtcattctcctgaacaccttccaggaattcttcggcctgagtaactgtgaaagcaccagtcaactggaccaagccacgcaggtgacagagactcttgggatgactcactgctgcatcaatcccatcatctatgccttcgttggggagaagttcagaagcctttttcacatagctcttggctgtaggattgccccactccaaaaaccagtgtgtggaggtccaggagtgagaccaggaaagaatgtgaaagtgactacacaaggactcctcgatggtcgtggaaaaggaaagtcaattggcagagcccctgaagccagtcttcaggacaaagaaggagcctagagacagaaatgacagatctctgctttggaaatcacacgtctggcttcacagatgtgtgattcacagtgtgaatcttggtgtctacgttaccaggcaggaaggctgagaggagagagactccagctgggttggaaaacagtattttccaaactaccttccagttcctcatttttgaatacaggcatagagttcagactttttttaaatagtaaaaataaaattaaagctgaaaactgcaacttgtaaatgtggtaaagagttagtttgagttgctatcatgtcaaacgtgaaaatgctgtattagtcacagagataattctagctttgagcttaagaattttgagcaggtggtatgtttgggagactgctgagtcaacccaatagttgttgattggcaggagttggaagtgtgtgatctgtgggcacattagcctatgtgcatgcagcatctaagtaatgatgtcgtttgaatcacagtatacgctccatcgctgtcatctcagctggatctccattctctcaggcttgctgccaaaagccttttgtgttttgttttgtatcattatgaagtcatgcgtttaatcacattcgagtgtttcagtgcttcgcagatgtccttgatgctcatattgttccctaatttgccagtgggaactcctaaatcaaattggcttctaatcaaagcttttaaaccctattggtaaagaatggaaggtggagaagctccctgaagtaagcaaagactttcctcttagtcgagccaagttaagaatgttcttatgttgcccagtgtgtttctgatctgatgcaagcaagaaacactgggcttctagaaccaggcaacttgggaactagactcccaagctggactatggctctactttcaggccacatggctaaagaaggtttcagaaagaagtggggacagagcagaactttcaccttcatatatttgtatgatcctaatgaatgcataaaatgttaagttgatggtgatgaaatgtaaatactgtttttaacaactatgatttggaaaataaatcaatgctataactatgttgataaaag

SEQ ID NO: 1419 - DNA, 1979 bp; single-stranded, linear
  immediate source library: GENBANK
  immediate source clone: g472557
caggactgcctgagacaagccacaagctgaacagagaaagtggattgaacaaggacgcatttccccagtacatccacaacatgctgtccacatctcgttctcggtttatcagaaataccaacgagagcggtgaagaagtcaccaccttttttgattatgattacggtgctccctgtcataaatttgacgtgaagcaaattggggcccaactcctgcctccgctctactcgctggtgttcatctttggttttgtgggcaacatgctggtcgtcctcatcttaataaactgcaaaaagctgaagtgcttgactgacatttacctgctcaacctggccatctctgatctgctttttcttattactctcccattgtgggctcactctgctgcaaatgagtgggtctttgggaatgcaatgtgcaaattattcacagggctgtatcacatcggttattttggcggaatcttcttcatcatcctcctgacaatcgatagatacctggctattgtccatgctgtgtttgctttaaaagccaggacggtcacctttggggtggtgacaagtgtgatcacctggttggtggctgtgtttgcttctgtcccaggaatcatctttactaaatgccagaaagaagattctgtttatgtctgtggcccttattttccacgaggatggaataatttccacacaataatgaggaacattttggggctggtcctgccgctgctcatcatggtcatctgctactcgggaatcctgaaaaccctgcttcggtgtcgaaacgagaagaagaggcatagggcagtgagagtcatcttcaccatcatgattgtttactttctcttctggactccctataacattgtcattctcctgaacaccttccaggaattcttcggcctgagtaactgtgaaagcaccagtcaactggaccaagccacgcaggtgacagagactcttgggatgactcactgctgcatcaatcccatcatctatgccttcgttggggagaagttcagaaggtatctctcggtgttcttccgaaagcacatcaccaagcgcttctgcaaacaatgtccagttttctacagggagacagtggatggagtgacttcaacaaacacgccttccactggggagcaggaagtctcggctggtttataaaacgaggagcagtttgattgttgtttataaagggagataacaatctgtatataacaacaaacttcaagggtttgttgaacaatagaaacctgtaaagcaggtgcccaggaacctcagggctgtgtgtactaatacagactatgtcacccaatgcatatccaacatgtgctcagggaataatccagaaaaactgtgggtagagactttgactctccagaaagctcatctcagctcctgaaaaatgcctcattaccttgtgctaatcctctttttctagtcttcataatttcttcactcaatctctgattctgtcaatgtcttgaaatcaagggccagctggaggtgaagaagagaatgtgacaggcacagatgaatgggagtgagggatagtggggtcagggctgagaggagaaggagggagacatgagcatggctgagcctggacaaagacaaaggtgagcaaagggctcacgcattcagccaggagatgatactggtccttagccccatctgccacgtgtatttaaccttgaagggttcaccaggtcagggagagtttgggaactgcaataacctgggagttttggtggagtccgatgattctcttttgcataagtgcatgacatatttttgctttattacagtttatctatggcacccatgcaccttacatttgaaatctatgaaatatcatgctccattgttcagatgcttcttaggccacatccccctgtctaaaaattcagaaaatttttgtttataaaagatgcattatctatgatatgctaatatatgtatatgcaatataaaatttag

SEQ ID NO: 1420 - DNA, 3900 bp; single-stranded, linear
  immediate source library: GENBANK
  immediate source clone: g475003
ctaggcctgggactcctgggtccccggcagtgtctggaggcatggctggggctggcgggggcctcggggtctgggggaacctggtgctgctgggcctgtgcagctggacaggggccagggcgcctgcccccaacccagggaggaacctgacagtggagactcagaccaccagctccatctccctgagctgggaggtccccgatggcctagactcacagaactccaactactgggttcagtgtactggagacggcggcacaacagagactcgaaacacaacagccaccaacgtcaccgtggatggccttggacccgggtcattgtatacgtgttctgtgtgggtggagaaagacggagtaaatagctctgtggggactgtcactactgccacagctcccaacccagtgaggaacctgagagtggaggctcagaccaacagctccatcgccctgacctgggaggtccccgacggcccagacccacagaactccacctacggggttgagtacactggagatggtggcagagcagggactcgaagcacagcacacactaacatcaccgtggatggacttgaacccgggtgtttgtatgcgttttccatgtgggtgggaaagaatggaatcaacagctcccgggagactcgaaatgccaccacagctcacaacccagtgaggaaacctgagagtggaggctcagaccaccagctccatctccctgagctgggaggtccccgatggcacagacccacagaactcgacctactgcgtacgagtgcactggagatggtggcagaacagagactcgaaacacaacagacaccagagtcaccagtggatggccttggacccgggtcattgtatacgtgttctgtgtgggtggagaaagacggagtaaatagctcctcgtggagattggtaactagtaccacagctcccaacccagtgagaaacctgacagtggaggctcagaccaacagctccatcgccctgacctgggaggtccccgatggcccagacccacagaactccacctacggggttgagtacactggagatggtggcagagcagggactcgaagcacagcacacaccaacatcaccgtggatagacttgaacccgggtgtttgtatgtgttttccgtgtgggtggggaagaatggaatcaacagctcccgggagactcgaaatgccaccacagcccccaacccagtgagaaacctccatatggagactcagaccaacagctccatcgccctatgctgggaagtccccgatggcccataccctcaggactacacctactgggtagggtacactggagacggtggtggcacagagacccgaaacacaacaaataccagtgtgacagctgagagacttgagcccggaaccttgtacacattctctgtatgggcagaaaaaaatggagcacgtggctccaggcagaatgtcagcatctccacagtccccaacgcagtgacaagcctcagcaagcaggactggaccaacagcaccattgctttgcgctggacagctccccagggcccaggccagtcttcctacagctactgggtctcatgggtcagggaaggcatgactgaccccaggacccaaagcacctcaggtactgacatcaccctaaaggaactggaagctggcagcctgtaccacctcaccgtctgggccgagaggaatgaggtcagaggctataacagcaccctcactgcagccactgctcccaatgaggtcacagatctccagaatgaaactcagactaagaactcagtcatgctgtggtggaaggcccctggagacccccactctcagttgtacgtatactgggtccagtgggccagcaagggacatccccggagggggcaagatccccaagcgaattgggtcaaccagaccagcaggaccaatgagacgtggtacaaagtggaggccctggaacccgggacgttgtacaatttcaccgtgtgggcagagaggaatgacgtagccagttccacgcagagcctctgtgcgtccacatacccagacacagtcaccatcacttcctgtgtcagcacctcagcgggctatggagtcaacttgatctggtcctgcccccagggaggctacgaggcctttgagttggaggtgggaggacagcggggctcccaggacagatcttcatgtggggaggctgtgtctgtgttgggtctcgggccggctcggtcctacccagccaccatcacgaccatctgggacggaatgaaggtcgtgtctcactctgtggtctgccacaccgagagtgcaggggtcattgccggagcctttgtgggcatcctcctgtttctcatcctcgtgggcctgctgattttcttcctgaagaggaggaataagaagaagcagcagaaaccagaactcagggatctggtctttagctccccaggggacatcccagctgaagacttcgctgaccacgtcaggaagaatgagagggacagcaactgtggttttgcagacgagtaccagcaactctccctggtgggccacagccagtctcagatggtggcttcggcttcagagaacaacgccaagaaccgctacagaaatgtgctgccctatgactggtcccgggtgcccctgaagcccatccatgaggagccaggctctgactacatcaatgccagcttcatgcccggtctctggagcccccaggagttcattgcaacccagggtcccctgccacagacagtgggtgacttctggcgcctggtgtgggaacagcagagccacaccctggtcatgctgaccaactgcatggaggccggccgggtgaagtgtgagcattactggcctctggactcgcagccctgcacccatgggcacctgcgggtaaccctggtaggtgaggaagtgatggagaactggacggtgcgggaactgctgctcctccaggtggaggagcagaagacactgtctgtgcgccaattccactaccaggcctggccggatcacggcgttccctcctccccagacaccttgctggctttctggaggatgcttcggcagtggctggatcagaccatggagggaggcccacccattgtgcactgcagtgctggcgtgggtcgcacaggaaccctcattgccctggacgtcctgctccggcagctgcagtccgagggtctccttgggcccttcagctttgtaaggaagatgagagagagtcggccgttgatggtgcagactgaggctcagtacgtattcctgcatcagtgcatctgcggttcctccaacagtcagcccaggccccagccgagaaggaagtcccgtatgaggatgtcgaaaacctcatctacgagaacgtggccgccatccaggcccacaagttggaggtctaagtgacgagggggctgggtcggcagcccaggcatcctcaagctctggacacccacttgagcccagattcctggaagagcagagggctgggctcccagactcctgggtgctgtgggaggagggggctggtatcccaaactctggtttccccaggagagagtggtctggtgggcttcagatgagtcctatgggagctggggatctggattcctggttccctgaaggaggagagggatgatagcttggattccctaggtctttccaggatgcagaaagaaacaggctggggcctggattctgaggcaggaaggaatttgggtctggagttctggctacttgaggaccaaaggcaggaaggatcctgccttgattttacttcagaaaccaaatcagtcttctataatctggggtcggagggagtccctgtgcccaaggtctctctgcaccccaccatccacatgtatttttccttctatcccataatttattaaatcactgttctccccag

SEQ ID NO: 1421 - DNA, 3632 bp; single-stranded, linear
  immediate source library: GENBANK
  immediate source clone: g482802
aaagagctggaggcgcgcaggccggctccgctccggccccggacgatgcggcgcgcccaggatgctgccgtgcctcgtagtgctgctggcggcgctcctcagcctccgtcttggctcagacgctcatgggacagagctgcccagccctccgtctgtgtggtttgaagcagaatttttccaccacatcctccactggacacccatcccaaatcagtctgaaagtacctgctatgaagtggcgctcctgaggtatggaatagagtcctggaactccatctccaactgtagccagaccctgtcctatgaccttaccgcagtgaccttggacctgtaccacagcaatggctaccgggccagagtgcgggctgtggacggcagccggcactccaactggaccgtcaccaacacccgcttctctgtggatgaagtgactctgacagttggcagtgtgaacctagagatccacaatggcttcatcctcgggaagattcagctacccaggcccaagatggcccccgcgaatgacacatatgaaagcatcttcagtcacttccgagagtatgagattgccattcgcaaggtgccgggaaacttcacgttcacacacaagaaagtaaaacatgaaaacttcagcctcctaacctctggagaagtgggagagttctgtgtccaggtgaaaccatctgtcgcttcccgaagtaacaaggggatgtggtctaaagaggagtgcatctccctcaccaggcagtatttcaccgtgaccaacgtcatcatcttctttgcctttgtcctgctgctctccggagccctcgcctactgcctggccctccagctgtatgtgcggcgccgaaagaagctacccagtgtcctgctcttcaagaagcccagccccttcatcttcatcagccagcgtccctccccagagacccaagacaccatccacccgcttgatgaggaggcctttttgaaggtgtccccagagctgaagaacttggacctgcacggcagcacagacagtggctttggcagcaccaagccatccctgcagactgaagagccccagttcctcctccctgaccctcacccccaggctgacagaacgctgggaaacggggagccccctgtgctgggggacagctgcagtagtggcagcagcaatagcacagacagcgggatctgcctgcaggagcccagcctgagccccagcacagggcccacctgggagcaacaggtggggagcaacagcaggggccaggatgacagtggcattgacttagttcaaaactctgagggccgggctggggacacacagggtggctcggccttgggccaccacagtcccccggagcctgaggtgcctggggaagaagacccagctgctgtggcattccagggttacctgaggcagaccagatgtgctgaagagaaggcaaccaagacaggctgcctggaggaagaatcgcccttgacagatggccttggccccaaattcgggagatgcctggttgatgaggcaggcttgcatccaccagccctggccaagggctatttgaaacaggatcctctagaaatgactctggcttcctcaggggccccaacgggacagtggaaccagcccactgaggaatggtcactcctggccttgagcagctgcagtgacctgggaatatctgactggagctttgcccatgaccttgcccctctaggctgtgtggcagccccaggtggtctcctgggcagctttaactcagacctggtcaccctgcccctcatctctagcctgcagtcaagtgagtgactcgggctgagaggctgcttttgattttagccatgcctgctcctctgcctggaccaggaggagggccctggggcagaagttaggcacgaggcagtctgggcacttttctgcaagtccactggggctggcccagccaggctgcagggctggtcagggtgtctggggcaggaggaggccaactcactgaactagtgcagggtatgtgggtggcactgacctgttctgttgactggggccctgcagactctggcagagctgagaagggcagggaccttctccctcctaggaactctttcctgtatcataaaggattatttgctcaggggaaccatggggctttctggagttgtggtgaggccaccaggctgaagtcagctcagacccagacctccctgcttaggccactcgagcatcagagcttccagcaggaggaagggctgtaggaatggaagcttcagggccttgctgctggggtcatttttaggggaaaaaggaggatatgatggtcacatggggaacctcccctcatcgggcctctggggcaggaagcttgtcactggaagatcttaaggtatatattttctggacactcaaacacatcataatggattcactgaggggagacaaagggagccgagaccctggatggggcttccagctcagaacccatccctctggtgggtacctctggcacccatctgcaaatatctccctctctccaacaaatggagtagcatccccctggggcacttgctgaggccaagccactcacatcctcactttgctgccccaccatcttgctgacaacttccagagaagccatggttttttgtattggtcataactcagccctttgggcggcctctgggcttgggcaccagctcatgccagccccagagggtcagggttggaggcctgtgcttgtgtttgctgctaatgtccagctacagacccagaggataagccactgggcactgggctggggtccctgccttgttggtgttcagctgtgtgattttggactagccacttgtcagagggcctcaatctcccatctgtgaaataaggactccacctttaggggaccctccatgtttgctgggtattagccaagctggtcctgggagaatgcagatactgtccgtggactaccaagctggcttgtttcttatgccagaggctaacagatccaatgggagtccatggtgtcatgccaagacagtatcagacacagccccagaagggggcattatgggccctgcctccccataggccatttggactctgccttcaaacaaaggcagttcagtccacaggcatggaagctgtgaggggacaggcctgtgcgtgccatccagagtcatctcagccctgcctttctctggagcattctgaaaacagatattctggcccagggaatccagccatgacccccacccctctgccaaagtactcttaggtgccagtctggtaactgaactccctctggaggcaggcttgagggaggattcctcagggttcccttgaaagctttatttatttattttgttcatttatttattggagaggcagcattgcacagtgaaagaattctggatatctcaggagccccgaaattctagctctgactttgctgtttccagtggtatgaccttggagaagtcacttatcctcttggagcctcagtttcctcatctgcagaataatgactgacttgtctaattcatagggatgtgaggttctgctgaggaaatgggtatgaatgtgccttgaacacaaagctctgtcaataagtgatacatgttttttattccaataaattgtcaagaccaca

SEQ ID NO: 1422 - DNA, 859 bp; single-stranded, linear
  immediate source library: GENBANK
  immediate source clone: g483844
tggaaagggctgtcacccggcttggccccttccacacccaactggggcaagcctgacccggcgacaggaggcatgaggggcccccggccgaaatgacagtgctggcgccagcctggagcccaacaacctatctcctcctgctgctgctgctgagctcgggactcagtgggacccaggactgctccttccaacacagccccatctcctccgacttcgctgtcaaaatccgtgagctgtctgactacctgcttcaagattacccagtcaccgtggcctccaacctgcaggacgaggagctctgcggggcgctctggcggctggtcctggcacagcgctggatggagcggctcaagactgtcgctgggtccaagatgcaaggcttgctggagcgcgtgaacacggagatacactttgtcaccaaatgtgcctttcagcccccccccagctgtcttcgcttcgtccagaccaacatctcccgcctcctgcaggagacctccgagcagctggtggcgctgaagccctggatcactcgccagaacttctcccggtgcctggagctgcagtgtcagcccgactcctcaaccctgccacccccatggagtccccggcccctggaggccacagccccgacagccccgcagccccctctgctcctcctactgctgctgcccgtgggcctcctgctgctggccgctgcctggtgcctgcactggcagaggacgcggcggaggacaccccgccctggggagcaggtgccccccgtccccagtccccaggacctgctgcttgtggagcactgacctggccaaggcctcatcctggggaggatacgtaggcacacagaggggagtcaccagcc

SEQ ID NO: 1423 - DNA, 699 bp; single-stranded, linear
  immediate source library: GENBANK
  immediate source clone: g493244
catccggtgtggtcgacgggtcctccaagagtttggggcgcggaccggagtaccttgcgtgcagttatgtcggcgtcggtagtgtctgtcatttcgcggttcttagaagagtacttgagctccactccgcagcgtctgaagttgctggacgcgtacctgctgtatatactgctgaccggggcgctgcagttcggttactgtctcctcgtggggaccttccccttcaactcttttctctcgggcttcatctcttgtgtggggagtttcatcctagcggtttgcctgagaatacagatcaacccacagaacaaagcggatttccaaggcatctccccagagcgagcctttgctgattttctctttgccagcaccatcctgcaccttgttgtcatgaactttgttggctgaatcattctcatttacttaattgaggagtaggagactaaaagaatgttcactctttgaatttcctggataagagttctggagatggcagcttattggacacatggattttcttcagatttgacacttactgctagctctgctttttatgacaggagaaaagcccagagttcactgtgtgtcagaacaactttctaacaaacatttattaatccagcctctgcctttcattaaatgtaaccttttgctttccaaattaaagaactccatgccactcctcaaaaaaaaaaaaaa

SEQ ID NO: 1424 - DNA, 952 bp; single-stranded, linear
  immediate source library: GENBANK
  immediate source clone: g494988
tgaactctggatgctgttagcctgagactcaggaagacaacttctgcagggtcactccctggcttctggaggaaagagaaggagggcagtgctccagtggtacagaagtgagacataatggaatcaggcttcacctccaaggacacctatctaagccattttaaccctcgggattacctagaaaaatattacaagtttggttctaggcactctgcagaaagccagattcttaagcaccttctgaaaaatcttttcaagatattctgcctagacggtgtgaagggagacctgctgattgacatcggctctggccccactatctatcagctcctctctgcttgtgaatcctttaaggagatcgtcgtcactgactactcagaccagaacctgcaggagctggagaagtggctgaagaaagagccagaggcctttgactggtccccagtggtgacctatgtgtgtgatcttgaagggaacagagtcaagggtccagagaaggaggagaagttgagacaggcggtcaagcaggtgctgaagtgtgatgtgactcagagccagccactgggggccgtccccttacccccggctgactgcgtgctcagcacactgtgtctggatgccgcctgcccagacctccccacctactgcagggcgctcaggaacctcggcagcctactgaagccagggggcttcctggtgatcatggatgcgctcaagagcagctactacatgattggtgagcagaagttctccagcctccccctgggccgggaggcagtagaggctgctgtgaaagaggctggctacacaatcgaatggtttgaggtgatctcgcaaagttattcttccaccatggccaacaacgaaggacttttctccctggtggcgaggaagctgagcagacccctgtgatgcctgtgacctcaattaaagcaattcctttgacctgtca

SEQ ID NO: 1425 - DNA, 1021 bp; single-stranded, linear
  immediate source library: GENBANK
  immediate source clone: g495251
cccgccggcggcgcgcacggcaactttggagaggcgagcagcagccccggcagcggcggcagcagcggcaatgaccccttggctcgggctcatcgtgctcctgggcagctggagcctgggggactggggcgccgaggcgtgcacatgctcgcccagccacccccaggacgccttctgcaactccgacatcgtgatccgggccaaggtggtggggaagaagctggtaaaggaggggcccttcggcacgctggtctacaccatcaagcagatgaagatgtaccgaggcttcaccaagatgccccatgtgcagtacatccacacggaagcttccgagagtctctgtggccttaagctggaggtcaacaagtaccagtacctgctgacaggtcgcgtctatgatggcaagatgtacacggggctgtgcaacttcgtggagaggtgggaccagctcaccctctcccagcgcaaggggctgaactatcggtatcacctgggttgtaactgcaagatcaagtcctgctactacctgccttgctttgtgacttccaagaacgagtgtctctggaccgacatgctctccaatttcggttaccctggctaccagtccaaacactacgcctgcatccggcagaagggcggctactgcagctggtaccgaggatgggcccccccggataaaagcatcatcaatgccacagacccctgagcgccagaccctgccccacctcacttccctcccttcccgctgagcttcccttggacactaactcttcccagatgatgacaatgaaattagtgcctgttttcttgcaaatttagcacttggaacatttaaagaaaggtctatgctgtcatatggggtttattgggaactatcctcctggccccaccctgccccttctttttggttttgacatcattcatttccacctgggaatttctggtgccatgccagaaagaatgaggaacctgtattcctcttcttcgtgataatataatctctatttttttaggaaaaaaa

SEQ ID NO: 1426 - DNA, 5102 bp; single-stranded, linear
  immediate source library: GENBANK
  immediate source clone: g501030
gcttctgcgactccagttgtgagagccgcaagggcatgggaattgacgccactcaccgacccccagtctcaatctcaacgctgtgaggaaacctcgactttgccaggtccccaagggcagcggggctcggcgagcgaggcacccttctccgtccccatcccaatccaagcgctcctggcactgacgacgccaagagactcgagtgggagttaaagcttccagtgagggcagcaggtgtccaggccgggcctgcgggttcctgttgacgtcttgccctaggcaaaggtcccagttccttctcggagccggctgtcccgcgccactggaaaccgcacctccccgcagcatgggcaccagcctcagcccgaacgacccttggccgctaaacccgctgtccatccagcagaccacgctcctgctactcctgtcggtgctggccactgtgcatgtgggccagcggctgctgaggcaacggaggcggcagctccggtccgcgcccccgggcccgtttgcgtggccactgatcggaaacgcggcggcggtgggccaggcggctcacctctcgttcgctcgcctggcgcggcgctacggcgacgttttccagatccgcctgggcagctgccccatagtggtgctgaatggcgagcgcgccatccaccaggccctggtgcagcagggctcggccttcgccgaccggccggccttcgcctccttccgtgtggtgtccggcggccgcagcatggctttcggccactactcggagcactggaaggtgcagcggcgcgcagcccacagcatgatgcgcaacttcttcacgcgccagccgcgcagccgccaagtcctcgagggccacgtgctgagcgaggcgcgcgagctggtggcgctgctggtgcgcggcagcgcggacggcgccttcctcgacccgaggccgctgaccgtcgtggccgtggccaacgtcatgagtgccgtgtgtttcggctgccgctacagccacgacgaccccgagttccgtgagctgctcagccacaacgaagagttcgggcgcacggtgggcgcgggcagcctggtggacgtgatgccctggctgcagtacttccccaacccggtgcgcaccgttttccgcgaattcgagcagctcaaccgcaacttcagcaacttcatcctggacaagttcttgaggcactgcgaaagccttcggcccggggccgccccccgcgacatgatggacgcctttatcctctctgcggaaaagaaggcggccggggactcgcacggtggtggcgcgcggctggatttggagaacgtaccggccactatcactgacatcttcggcgccagccaggacaccctgtccaccgcgctgcagtggctgctcctcctcttcaccaggtatcctgatgtgcagactcgagtgcaggcagaattggatcaggtcgtggggagggaccgtctgccttgtatgggtgaccagcccaacctgccctatgtcctggccttcctttatgaagccatgcgcttctccagctttgtgcctgtcactattcctcatgccaccactgccaacacctctgtcttgggctaccacattcccaaggacactgtggtttttgtcaaccagtggtctgtgaatcatgacccagtgaagtggcctaacccggagaactttgatccagctcgattcttggacaaggatggcctcatcaacaaggacctgaccagcagagtgatgattttttcagtgggcaaaaggcggtgcattggcgaagaactttctaagatgcagctttttctcttcatctccatcctggctcaccagtgcgatttcagggccaacccaaatgagcctgcgaaaatgaatttcagttatggtctaaccattaaacccaagtcatttaaagtcaatgtcactctcagagagtccatggagctccttgatagtgctgtccaaaatttacaagccaaggaaacttgccaataagaagcaagaggcaagctgaaattttagaaatattcacatcttcggagatgaggagtaaaattcagtttttttccagttcctcttttgtgctgcttctcaattagcgtttaaggtgagcataaatcaactgtccatcaggtgaggtgtgctccatacccagcggttcttcatgagtagtgggctatgcaggagcttctgggagatttttttgagtcaaagacttaaagggcccaatgaattattatatacatactgcatcttggttatttctgaaggtagcattctttggagttaaaatgcacatatagacacatacacccaaacacttacaccaaactactgaatgaagaagtattttggtaaccaggccatttttggtgggaatccaagattggtctcccatatgcagaaatagacaaaaagtatattaaacaaagtttcagagtatattgttgaagagacagagacaagtaatttcagtgtaaagtgtgtgattgaaggtgataagggaaaagataaagaccagaaattcccttttcaccttttcaggaaaataacttagactctagtatttatgggtggatttatccttttgccttctggtatacttccttacttttaaggataaatcataaagtcagttgctcaaaaagaaatcaatagttgaattagtgagtatagtggggttccatgagttatcatgaattttaaagtatgcattattaaattgtaaaactccaaggtgatgttgtacctcttttgcttgccaaagtacagaatttgaattatcagcaaagaaaaaaaaaaaagccagccaagctttaaattatgtgaccataatgtactgatttcagtaagtctcataggttaaaaaaaaaagtcaccaaatagtgtgaaatatattacttaactgtccgtaagcagtatattagtattatcttgttcaggaaaaggttgaataatatatgccttgtgtaatattgaaaattgaaaagtacaactaacgcaaccaagtgtgctaaaaatgagcttgattaaatcaaccacctatttttgacatggaaatgaagcagggtttcttttcttcactcaaattttggcgaatctcaaaattagatcctaagatgtgttcttatttttataacatctttattgaaattctatttataatacagaatcttgttttgaaaataacctaattaatatattaaaattccaaattcatggcatgcttaaattttaactaaattttaaagccattctgattattgagttccagttgaagttagtggaaatctgaacattctcctgtggaaggcagagaaatctaagctgtgtctgcccaatgaataatggaaaatgccatgaattacctggatgttctttttacgaggtgacaagagttggggacagaactcccattacaactgaccaagtttctcttctagatgattttttgaaagttaacattaatgcctgctttttggaaagtcagaatcagaagatagtcttggaagctgtttggaaaagacagtggagatgaggtcagttgtgttttttaagatggcaattactttggtagctgggaaagcataaagctcaaatgaaatgtatgcattcacatttagaaaagtgaattgaagtttcaagttttaaagttcattgcaattaaacttccaaagaaagttctacagtgtcctaagtgctaagtgcttattacattttattaagctttttggaatctttgtaccaaaattttaaaaaagggagtttttgatagttgtgtgtatgtgtgtgtggggtggggggatggtaagagaaaagagagaaacactgaaaagaaggaaagatggttaaacattttcccactcattctgaattaattaatttggagcacaaaattcaaagcatggacatttagaagaaagatgtttggcgtagcagagttaaatctcaaataggctattaaaaaagtctacaacatagcagatctgttttgtggtttggaatattaaaaaacttcatgtaattttattttaaaatttcatagctgtacttcttgaatataaaaaatcatgccagtatttttaaaggcattagagtcaactacacaaagcaggcttgcccagtacatttaaattttttggcacttgccattccaaaatattatgccccaccaaggctgagacagtgaatttgggctgctgtagcctatttttttagattgagaaatgtgtagctgcaaaaataatcatgaaccaatctggatgcctcattatgtcaaccaggtccagatgtgctataatctgtttttacgtatgtaggcccagtcgtcatcagatgcttgcggcaaaagaaagctgtgtttatatggaagaaagtaaggtgcttggagtttacctggcttatttaatatgcttataacctagttaaagaaaggaaaagaaaacaaaaaacgaatgaaaataactgaatttggaggctggagtaatcagattactgctttaatcagaaaccctcattgtgtttctaccggagagagaatgtatttgctgacaaccattaaagtcagaagttttactccaggttattgcaataaagtataatgtttattaaatgcttcatttgtatgtcaaagctttgactctataagcaaattgcttttttccaaaacaaaaagatgtctcaggtttgttttgtgaattttctaaaagctttcatgtcccagaacttagcctttacctgtgaagtgttactacagccttaatattttcctagtagatctatattagatcaaatagttgcatagcagtatatgttaatttgtgtgtttttagctgtgacacaactgtgtgattaaaaggtatactttagtagacatttataactcaaggataccttcttatttaatcttttcttatttttgtactttatcatgaatgcttttagtgtgtgcataatagctacagtgcatagttgtagacaaagtacattctggggaaacaacatttatatgtagcctttactgtttgatataccaaattaaaaaaaaattgtatctcattacttatactgggacaccattaccaaaataataaaaatcactttcataatcttgaaaaaa

SEQ ID NO: 1427 - DNA, 1411 bp; single-stranded, linear
  immediate source library: GENBANK
  immediate source clone: g506334
cgggaaacggcaaacagcgagatatccgagcgagagtcccgccctgcatcagtttgcggaaccgccttggtagaaggagagaaggggagtggaggaagcacgggactggagggaccaaagttccccgatggcggcccaggggtgcgcggcatcgcggctgctccagctgctgctgcagcttctgcttctactgttgctgctggcggcgggcggggcgcgcgcgcggtggcgcgcggagggcaccagcgcacacttgcgggacatcttcctgggccgctgcgccgagtaccgcgcactgctgagtcccgagcagcggaacaagaactgcacagccatctgggaagcctttaaagtggcgctggacaaggatccctgctccgtgctgccctcagactatgacctttttattaacttgtccaggcactctattcccagagataagtccctgttctgggaaaatagccacctccttgttaacagctttgcagacaacacccgtcgttttatgcccctgagcgatgttctgtatggcagggttgcagatttcttgagctggtgtcgacagaaaaatgactctggactcgattaccaatcctgccctacatcagaagactgtgaaaataatcctgtggattccttttggaaaagggcatccatccagtattccaaggatagttctggggtgatccacgtcatgctgaatggttcagagccaacaggagcctatcccatcaaaggtttttttgcagattatgaaattccaaacctccagaaggaaaaaattacacgaatcgagatctgggttatgcatgaaattgggggacccaatgtggaatcctgcggggaaggcagcatgaaagtcctggaaaagaggctgaaggacatggggttccagtacagctgtattaatgattaccgaccagtgaagctcttacagtgcgtggaccacagcacccatcctgactgtgccttaaagtcggcagcagccgctactcaaagaaaagccccaagtctttatacagaacaaagggcgggtcttatcattcccctctttctggtgctggcttcccggactcaactgtaactggaaactgtgttgctctaaccctcctccagccctgcagcctccccttgcagtcatcattcgtgttctgtgtataccaaatgattctgttatctaaagaagctttttgctgggaaaacgatgtcctgaaaatggtatttcaatgaggcatatgttcaggatttcagaaacaagaagttagttctatttagcaggttaaaaaatgctgcattagaattaaagcaagttattttcttatttgtataatgacacaaagcattgggagtcagactgcttgtatattatcaaacattttaagagaattctaataaagctgtattttacatc

SEQ ID NO: 1428 - DNA, 1000 bp; single-stranded, linear
  immediate source library: GENBANK
  immediate source clone: g508854
cccaccttcaccatgtctgacgaggaagttgaacaggtggaggagcagtacgaagaagaagaggaagcccaggaggaagaggaagttcaagaagacaccgcagaggaggacgcggaagaggagaaaccgagacccaaactcactgctcctaagatcccagaaggggagaaagtggacttcgatgacatccagaagaagcgtcagaacaaagacctaatggagctccaggccctcatcgacagccactttgaagcccggaagaaggaggaggaggagctggtcgctctcaaagagagaatcgagaagcgccgtgcagagagagcggagcagcagaggattcgtgcagagaaggagagggagcgccagaacagactggcggaggaaaaggccagaagggaggaggaggatgccaagaggagggcagaggacgacctgaagaagaagaaagcgctgtcctccatgggcgccaactacagcagctacctggccaaggctgaccagaagagaggcaagaagcagacagcccgagagatgaagaagaagattctggctgagagacgcaagccgctcaacatcgatcaccttggtgaagacaaactgagggacaaggccaaggagctctgggagaccctgcaccagctggagattgacaagttcgagtttggggagaagctgaaacgccagaaatatgacatcaccacgctcaggagccgcattgaccaggcccagaagcacagcaagaaggctgggaccccagccaagggcaaagtcggcgggcgctggaagtagagaggccagaaaggccctcgaggcagagaccctccgccctcttgcacaccagggccgctcgtgggactccacatcctccagcccccacaatcctgtcaggggtctccctgacgtcctgggggtggagaggccatcccggggcgtcccccgcgtctgtgtccttgctgccttcatcccctggggcctgtgaataaagctgcagaaccccctt

SEQ ID NO: 1429 - DNA, 1509 bp; single-stranded, linear
  immediate source library: GENBANK
  immediate source clone: g510524
ggccagtgctgggtctttgctggcgtgaccaccacagtgctgcgctgcctgggtctggccacccgtactgtcaccaacttcaactccgcccacgacacagacacatcccttaccatggacatctacttcgacgagaacatgaagcccctggagcacctgaaccatgattctgtctggaacttccatgtgtggaacgactgctggatgaagaggccggatctgccctcgggctttgatgggtggcaggtggtggatgccacaccccaagagactagcagtggcatcttctgctgcggcccctgctctgtggagtccatcaagaatggcctggtctacatgaagtacgacacgcctttcatttttgctgaggtgaatagtgacaaggtgtactggcagcggcaggatgatggcagcttcaagattgtttatgtggaggagaaggccatcggcacactcattgtcacaaaggccatcagctccaacatgcgggaggacatcacctacctctataagcacccagaaggctcagacgcagagcggaaggcagtagagacagcagcagcccacggcagcaaacccaatgtgtatgccaaccggggctcagcggaggatgtggccatgcaggtggaggcacaggacgcggtgatggggcaggatctgatggtctctgtgatgctgatcaatcacagcagcagccgccgcacagtgaaactgcacctctacctctcagtcactttctatactggtgtcagtggtaccatcttcaaggagaccaagaaggaagtggagctggcaccaggggcctcggaccgtgtgaccatgccagtggcctacaaggaataccggccccatcttgtggaccagggggccatgctgctcaatgtctcaggccacgtcaaggagagcgggcaggtgctggccaagcagcacaccttccgtctgcgcaccccagacctctccctcacgttactgggagcagcagtggttggccaggagtgtgaagtacagattgtcttcaagaacccccttcccgtcaccctcaccaatgtcgtcttccggctcgaaggctctgggttacagaggcccaagatcctcaacgttggggacattggaggcaatgaaacagtgacactgcgccagtcgtttgtgcctgtgcgaccaggcccccgccagctcattgccagcttggacagcccacagctctcccaggtgcacggtgtcatccaggtggatgtggccccagcccctggggatgggggcttcttctcagacgctggaggtgacagtcacttaggagagaccatccctatggcatctcgaggtggagcttagccctgtgccaggagcaatgggactggagtcagatgagcaaggacattgccccaagataggggcacactacagagcagctccccaggagctcaggtggggagtccagggctcccggagagggagtcagtcttcacttgcactgggggaacagatgctaataaactgttttttaatgaa

SEQ ID NO: 1430 - DNA, 926 bp; single-stranded, linear
  immediate source library: GENBANK
  immediate source clone: g510900
gaatctctttctctcccttcagaatcttatcttggctttggatcttagaagagaatcactaaccagagacgagactcagtgagtgagcaggtgttttggacaatggactggttgagcccatccctattataaaaatgtctcagagcaaccgggagctggtggttgactttctctcctacaagctttcccagaaaggatacagctggagtcagtttagtgatgtggaagagaacaggactgaggccccagaagggactgaatcggagatggagacccccagtgccatcaatggcaacccatcctggcacctggcagacagccccgcggtgaatggagccactgcgcacagcagcagtttggatgcccgggaggtgatccccatggcagcagtaaagcaagcgctgagggaggcaggcgacgagtttgaactgcggtaccggcgggcattcagtgacctgacatcccagctccacatcaccccagggacagcatatcagagctttgaacaggtagtgaatgaactcttccgggatggggtaaactggggtcgcattgtggcctttttctccttcggcggggcactgtgcgtggaaagcgtagacaaggagatgcaggtattggtgagtcggatcgcagcttggatggccacttacctgaatgaccacctagagccttggatccaggagaacggcggctgggatacttttgtggaactctatgggaacaatgcagcagccgagagccgaaagggccaggaacgcttcaaccgctggttcctgacgggcatgactgtggccggcgtggttctgctgggctcactcttcagtcggaaatgaccagacactgaccatccactctaccctcccacccccttctctgctccaccacatcctccgtccagccgccattgccaccaggagaacccg

SEQ ID NO: 1431 - DNA, 597 bp; single-stranded, linear
  immediate source library: GENBANK
  immediate source clone: g516558
atgtcaaacgtgcgagtgtctaacgggagccctagcctggagcggatggacgccaggcaggcggagcaccccaagccctcggcctgcaggaacctcttcggcccggtggaccacgaagagttaacccgggacttggagaagcactgcagagacatggaagaggcgagccagcgcaagtggaatttcgattttcagaatcacaaacccctagagggcaagtacgagtggcaagaggtggagaagggcagcttgcccgagttctactacagacccccgcggccccccaaaggtgcctgcaaggtgccggcgcaggagagccaggatgtcagcgggagccgcccggcggcgcctttaattggggctccggctaactctgaggacacgcatttggtggacccaaagactgatccgtcggacagccagacggggttagcggagcaatgcgcaggaataaggaagcgacctgcaaccgacgattcttctactcaaaacaaaagagccaacagaacagaagaaaatgtttcagacggttccccaaatgccggttctgtggagcagacgcccaagaagcctggcctcagaagacgtcaaacgtaa

SEQ ID NO: 1432 - DNA, 1195 bp; single-stranded, linear
  immediate source library: GENBANK
  immediate source clone: g522194
gggcccgcgtggcgcgagcagaggcgcttctccgtctccaccttgcgcaacttgggcctgggcaagaagtcgttggagcagtgggtgaccgaggaggccgcctgcctttgtgccgccttcgccaaccactccggacgcccctttcgccccaacggtctcttggacaaagccgtgagcaacgtgatcgcctccctcacctgcgggcgccgcttcgagtacgacgaccctcgcttcctcaggctgctggacctagctcaggagggactgaaggaggagtcgggctttctgcgcgaggtgctgaatgctgtccccgtcctcctgcatatcccagcgctggctggcaaggtcctacgcttccaaaaggctttcctgacccagctggatgagctgctaactgagcacaggatgacctgggacccagcccagcccccccgagacctgactgaggccttcctggcagagatggagaaggccaaggggaaccctgagagcagcttcaatgatgagaacctgcgcatagtggtggctgacctgttctctgccgggatggtgaccacctcgaccacgctggcctggggcctcctgctcatgatcctacatccggatgtgcagcgccgtgtccaacaggagatcgacgacgtgatagggcaggtgcggcgaccagagatgggtgaccaggctcacatgccctacaccactgccgtgattcatgaggtgcagcgctttggggacatcgtccccctgggtgtgacccatatgacatcccgtgacatcgaagtacagggcttccgcatccctaagggaacgacactcatcaccaacctgtcatcggtgctgaaggatgaggccgtctgggagaagcccttccgcttccaccccgaacacttcctggatgcccagggccactttgtgaagccggaggccttcctgcctttctcagcaggccgccgtgcatgcctcggggagcccctggcccgcatggagctcttcctcttcttcacctccctgctgcagcacttcagcttctcggtgcccactggacagccccggcccagccaccatggtgtctttgctttcctggtgaccccatccccctatgagctttgtgctgtgccccgctagaatggggtacctagtccccagcctgctccctagccagaggctctaatgtacaataaagcaatgtggtagttcc

SEQ ID NO: 1433 - DNA, 2227 bp; single-stranded, linear
  immediate source library: GENBANK
  immediate source clone: g529642
ggagaggaggttgtctgggacagactgctcctgacagaaggatgtcccagctgagcctgtcctggctgggcctctggccagtggcagcatccccttggctgctcctcctgctggtcggggcctcctggctcctggcccatgtcctggcctggacctacgccttctatgacaactgccgccgccttcggtgtttcccacaacccccaagacggaactggttttggggacaccagggcatggtcaaccccacagaggagggcatgagagttctgactcagctggtggccacctacccccagggctttaaggtctggatgggacccatctcccccctcctcagtttgtgccaccccgacatcatccggtctgtcatcaacgcctcagctgccattgcaccaaaggacaagttcttctacagcttcctggagccctggctgggggatgggctcctgctgagtgctggtgacaagtggagccgccaccgtcggatgctgacgcctgccttccatttcaacatcctgaagccctatatgaagattttcaatgagagtgtgaacatcatgcacgccaagtggcagctcctggcctcagagggtagtgcctgtttggatatgtttgagcacatcagcctcatgaccttggacagtctacagaaatgtgtcttcagctttgacagccattgtcaggagaaacccagtgaatatattgccgccatcttggagctcagtgcccttgtatcaaaaagacaccatgagatcctcctgcatattgacttcctgtattatctcacccctgatgggcagcgtttccgcagggcctgccgcctggtgcacgacttcacagatgccgtcatccaggagcggcgccgcactctccctagccagggtgttgatgacttcctccaagccaaggccaaatccaagactttggacttcattgatgtactcctgctgagcaaggatgaagacgggaagaagttatctgatgaggacataagagcagaagctgacacctttatgtttgagggccatgacaccacggccagtggtctctcctgggtcctgtaccaccttgcaaagcacccagaataccaggagcgctgccggcaggaggtgcaagaacttctgaaggaccgtgagcctaaagagattgaatgggacgacctggcccatttgcccttcctgaccatgtgcatgaaggagagcctgcggctgcatcccccagtcccggtcatctcccgccatgtcacccaggacattgtgctcccagacggccgggtcatccccaaaggcattatctgcctcatcagtgttttcggaacccatcacaacccagctgtgtggccggaccctgaggtctacgacccctttcgctttgacccagagaacatcaaggagaggtcacctctggcttttattcccttctcggcagggcccaggaactgcatcgggcagacgttcgcgatggcggagatgaaggtggtcctggcgctcacgctgctgcgcttccgcgtcctgcctgaccacaccgagccccgcaggaagccggagctggtcctgcgcgcagagggcggactttggctgcgggtggagcccctgagctgagttctgcagagacccactctgaccccactaaaatgacccctgattcatcaaaagtgaagcctagaattaccctaagaccctgttccacagtcctgtattccatcctagatatctactcaaaataattgagacaagtgttcaaacagaaagacgcttgtgcgtgaatgttcatggcggccctattcacagtagccaaacgatgaaaacaaccccaagctatatattaccagatgaaaggataaacaaaatgtggtccatccatacaatggagtattacacagccataaaaaggaatgaagcagtgatccctactacactgtggatgaagccttgaatgcatgatactgaatgaaagacgtcagatgcaaaaggtcacatagtgtactgtgccttttatacgaaatttccagaacaggccaatctgaagagatgcatagcggattggtggctttcagcagctgtggggaggtgggactgaggagcgactgctaatcagtatggggtttcctcccgggatggtgaaaatgttccggacctagatactgacgaaggtagcacgacactgtgagtgcactaaatgctattgaattggacactttgaaatggtgaatttcgtggtatgt

SEQ ID NO: 1434 - DNA, 3306 bp; single-stranded, linear
  immediate source library: GENBANK
  immediate source clone: g529723
gggaagcatggggcttcccaggctggtctgcgccttcttgctcgccgcctgctgctgctgtcctcgcgtcgcgggtgtgcccggagaggctgagcagcctgcgcctgagctggtggaggtggaagtgggcagcacagcccttctgaagtgcggcctctcccagtcccaaggcaacctcagccatgtcgactggttttctgtccacaaggagaagcggacgctcatcttccgtgtgcgccagggccagggccagagcgaacctggggagtacgagcagcggctcagcctccaggacagaggggctactctggccctgactcaagtcaccccccaagacgagcgcatcttcttgtgccagggcaagcgccctcggtcccaggagtaccgcatccagctccgcgtctacaaagctccggaggagccaaacatccaggtcaaccccctgggcatccctgtgaacagtaaggagcctgaggaggtcgctacctgtgtagggaggaacgggtaccccattcctcaagtcatctggtacaagaatggccggcctctgaaggaggagaagaaccgggtccacattcagtcgtcccagactgtggagtcgagtggtttgtacaccttgcagagtattctgaaggcacagctggttaaagaagacaaagatgcccagttttactgtgagctcaactaccggctgcccagtgggaaccacatgaaggagtccagggaagtcaccgtccctgttttctacccgacagaaaaagtgtggctggaagtggagcccgtgggaatgctgaaggaaggggaccgcgtggaaatcaggtgtttggctgatggcaaccctccaccacacttcagcatcagcaagcagaaccccagcaccagggaggcagaggaagagacaaccaacgacaacggggtcctggtgctggagcctgcccggaaggaacacagtgggcgctatgaatgtcaggcctggaacttggacaccatgatatcgctgctgagtgaaccacaggaactactggtgaactatgtgtctgacgtccgagtgagtcccgcagcccctgagagacaggaaggcagcagcctcaccctgacctgtgaggcagagagtagccaggacctcgagttccagtggctgagagaagagacagaccaggtgctggaaagggggcctgtgcttcagttgcatgacctgaaacgggaggcaggaggcggctatcgctgcgtggcgtctgtgcccagcatacccggcctgaaccgcacacagctggtcaagctggccatttttggccccccttggatggcattcaaggagaggaaggtgtgggtgaaagagaatatggtgttgaatctgtcttgtgaagcgtcagggcacccccggcccaccatctcctggaacgtcaacggcacggcaagtgaacaagaccaagatccacagcgagtcctgagcaccctgaatgtcctcgtgaccccggagctgttggagacaggtgttgaatgcacggcctccaacgacctgggcaaaaacaccagcatcctcttcctggagctggtcaatttaaccaccctcacaccagactccaacacaaccactggcctcagcacttccactgccagtcctcataccagagccaacagcacctccacagagagaaagctgccggagccggagagccggggcgtggtcatcgtggctgtgattgtgtgcatcctggtcctggcggtgctgggcgctgtcctctatttcctctataagaagggcaagctgccgtgcaggcgctcagggaagcaggagatcacgctgcccccgtctcgtaagaccgaacttgtagttgaagttaagtcagataagctcccagaagagatgggcctcctgcagggcagcagcggtgacaagagggctccgggagaccagggagagaaatacatcgatctgaggcattagccccgaatcacttcagctcccttccctgcctggaccattcccagctccctgctcactcttctctcagccaaagctcaaagggactagagagaagcctcctgctcccctcgcctgcacaccccctttcagagggccactgggttaggacctgaggacctcacttggccctgcaaggcccgcttttcagggaccagtccaccaccatctcctccacgttgagtgaagctcatcccaagcaaggagccccagtctcccgagcgggtaggagagtttcttgcagaacgtgttttttctttacacacattatgctgtaaatacgctcgtcctgccagcagctgagctgggtagcctctctgagctggtttcctgccccaaaggctggcattccaccatccaggtgcaccactgaagtgaggacacaccggagccaggcgcctgctcatgttgaagtgcgctgttcacacccgctccggagagcaccccagcagcatccagaagcagctgcagtgcaagcttgcatgcctgcgtgttgctgcaccaccctcctgtctgcctcttcaaagtctcctgtgacattttttctttggtcagaggccaggaactgtgtcattccttaaagatacgtgccggggccaggtgtggctcacgcctgtaatcccagcactttgggaggccgaggcggcggatcacaaagtcagacgagaccatcctggctaacacggtgaaaccctgtctctactaaaaatacaaaaaaaaattagctaggcgtagtggttggcacctatagtcccagctactcggaaggctgaagcaggagaatggtatgaatccaggaggtggagcttgcagtgagccgagaccgtgccactgcactccagcctgggcaacacagcgagactccgtctcgaggaaaaaaaaaatcgtgctcgtagcagctggctctgtttcgagtcaggtgaattagcctcaatccccgtgttcacttgctcccatagccctcttgatggatcacgtaaaactgaaaggcagcggggagcagacaaagatgaggtctacactgtccttcatggggattaaagctatggttatattagcaccaaacttctacaaaccaagctcaggacccaaccctagaagggcccaaatgagagaatggtacttagggatggcaaaacgggcctggctagagcttcgggtgtgtgtgtctgtctgtgtatgcatacatatgtgtgtatatatggttttgtcaggtgtgtaaatttgcaaattgtttcctttatatatgtatgtatatatatatatgaaaatatatatatatatgaaaaataaagcttaattgtcccagaaaaaaaaaaaaa

SEQ ID NO: 1435 - DNA, 3063 bp; single-stranded, linear
  immediate source library: GENBANK
  immediate source clone: g535512
ggcacgagtggctgcttgcggctagtggatggtaattgcctgcctcgcgctagcagcaagctgctctgttaaaagcgaaaatgaaacaattgcctgcggcaacagttcgactcctttcaagttctcagatcatcacttcggtggtcagtgttgtaaaagagcttattgaaaactccttggatgctggtgccacaagcgtagatgttaaactggagaactatggatttgataaaattgaggtgcgagataacggggagggtatcaaggctgttgatgcacctgtaatggcaatgaagtactacacctcaaaaataaatagtcatgaagatcttgaaaatttgacaacttacggttttcgtggagaagccttggggtcaatttgttgtatagctgaggttttaattacaacaagaacggctgctgataattttagcacccagtatgttttagatggcagtggccacatactttctcagaaaccttcacatcttggtcaaggtacaactgtaactgctttaagattatttaagaatctacctgtaagaaagcagttttactcaactgcaaaaaaatgtaaagatgaaataaaaaagatccaagatctcctcatgagctttggtatccttaaacctgacttaaggattgtctttgtacataacaaggcagttatttggcagaaaagcagagtatcagatcacaagatggctctcatgtcagttctggggactgctgttatgaacaatatggaatcctttcagtaccactctgaagaatctcagatttatctcagtggatttcttccaaagtgtgatgcagaccactctttcactagtctttcaacaccagaaagaagtttcatcttcataaacagtcgaccagtacatcaaaaagatatcttaaagttaatccgacatcattacaatctgaaatgcctaaaggaatctactcgtttgtatcctgttttctttctgaaaatcgatgttcctacagctgatgttgatgtaaatttaacaccagataaaagccaagtattattacaaaataaggaatctgttttaattgctcttgaaaatctgatgacgacttgttatggaccattacctagtacaaattcttatgaaaataataaaacagatgtttccgcagctgacatcgttcttagtaaaacagcagaaacagatgtgctttttaataaagtggaatcatctggaaagaattattcaaatgttgatacttcagtcattccattccaaaatgatatgcataatgatgaatctggaaaaaacactgatgattgtttaaatcaccagataagtattggtgactttggttatggtcattgtagtagtgaaatttctaacattgataaaaacactaagaatgcatttcaggacatttcaatgagtaatgtatcatgggagaactctcagacggaatatagtaaaacttgttttataagttccgttaagcacacccagtcagaaaatggcaataaagaccatatagatgagagtggggaaaatgaggaagaagcaggtcttgaaaactcttcggaaatttctgcagatgagtggagcaggggaaatatacttaaaaattcagtgggagagaatattgaacctgtgaaaattttagtgcctgaaaaaagtttaccatgtaaagtaagtaataataattatccaatccctgaacaaatgaatcttaatgaagattcatgtaacaaaaaatcaaatgtaatagataataaatctggaaaagttacagcttatgatttacttagcaatcgagtaatcaagaaacccatgtcagcaagtgctctttttgttcaagatcatcgtcctcagtttctcatagaaaatcctaagactagtttagaggatgcaacactacaaattgaagaactgtggaagacattgagtgaagaggaaaaactgaaatatgaagagaaggctactaaagacttggaacgatacaatagtcaaatgaagagagccattgaacaggagtcacaaatgtcactaaaagatggcagaaaaaagataaaacccaccagcgcatggaatttggcccagaagcacaagttaaaaacctcattatctaatcaaccaaaacttgatgaactccttcagtcccaaattgaaaaaagaaggagtcaaaatattaaaatggtacagatccccttttctatgaaaaacttaaaaataaattttaagaaacaaaacaaagttgacttagaagagaaggatgaaccttgcttgatccacaatctcaggtttcctgatgcatggctaatgacatccaaaacagaggtaatgttattaaatccatatagagtagaagaagccctgctatttaaaagacttcttgagaatcataaacttcctgcagagccactggaaaagccaattatgttaacagagagtctttttaatggatctcattatttagacgttttatataaaatgacagcagatgaccaaagatacagtggatcaacttacctgtctgatcctcgtcttacagcgaatggtttcaagataaaattgataccaggagtttcaattactgaaaattacttggaaatagaaggaatggctaattgtctcccattctatggagtagcagatttaaaagaaattcttaatgctatattaaacagaaatgcaaaggaagtttatgaatgtagacctcgcaaagtgataagttatttagagggagaagcagtgcgtctatccagacaattacccatgtacttatcaaaagaggacatccaagacattatctacagaatgaagcaccagtttggaaatgaaattaaagagtgtgttcatggtcgcccattttttcatcatttaacctatcttccagaaactacatgattaaatatgtttaagaagattagttaccattgaaattggttctgtcataaaacagcatgagtctggttttaaattatctttgtattatgtgtcacatggttattttttaaatgaggattcactgacttgtttttatattgaaaaaagttccacgtattgtagaaaacgtaaataaactaataac

SEQ ID NO: 1436 - DNA, 2382 bp; single-stranded, linear
  immediate source library: GENBANK
  immediate source clone: g536878
agcaggtgctgcaccatgagtgtctctgtgctgagccccagcagactcctgggtgatgtctctggaatcctccaagcggcctccctgctcattctgcttctgctgctgatcaaggcagttcagctctacctgcacaggcagtggctgctcaaagccctccagcagttcccgtgccctccctcccactggctcttcgggcacatccaggagctccaacaggaccaggagctacaacggattcagaaatgggtggagacattcccaagtgcctgtcctcattggctatggggaggcaaagttcgtgtccagctctatgaccctgactatatgaaggtgattctggggagatcagacccgaaatcccatggttcctacagattcctggctccatggattgggtacggcttgctcctgttgaatgggcagacatggttccagcatcgacggatgctgaccccagccttccactatgacatcctgaagccctatgtggggctcatggcagactctgtacgagtgatgctggacaaatgggaagagctccttggccaggattcccctctggaggtctttcagcacgtctccttgatgaccctggacaccatcatgaagtgtgccttcagccatcagggcagcatccaggtggacaggaattctcagtcctacatacaggccattagtgacctgaacaacctggttttttcccgtgtgaggaatgcctttcaccagaatgacaccatctacagcctgacctctgctggccgctggacacaccgcgcctgccagctggcccatcagcacacagaccaagtgatccaactgaggaaggctcaactacagaaggagggggagctggagaagatcaagaggaagaggcatttggattttctggatatcctcctcttggccaaaatggagaatgggagcatcttgtcagacaaggacctccgtgctgaggtggacacgttcatgtttgagggccatgacaccacagccagtgggatctcctggatcctctatgctctggccacacaccccaagcatcaggagaggtgccgggaggagatccacagcctcctgggtgatggagcctccatcacctggaaccacctggaccagatgccctacaccaccatgtgcattaaggaggcactgaggctctacccaccggtgccaggcattggcagagagctcagcactcccgtcaccttccctgatgggcgctccttgcccaaaggtatcatggtcctcctctccatttatggccttcaccacaacccaaaagtgtggcccaacccagaggtgtttgaccctttccgttttgcaccgggttctgctcaacacagccacgctttcctgcccttctcaggaggatcaaggaactgcatcgggaaacaatttgccatgaacgagctgaaggtggccacggccctgaccctgctccgctttgagctgctgcctgatcccaccaggatccccatccccattgcacgacttgtgttgaaatccaaaaatggaatccacctgcgtctcaggaggctccctaacccttgtgaagacaaggaccagctttgagggcctccacctgccgtcctgtcttcctgacccccgcttctgtccccttcctgtctgcccatatcctgttttctgtctgcccaccttcccttcttcccacctgcctgctgtcccccagtctgcctgcccttctctctctcacctttctccaggctccctacctgcttgtctacctgtctcctacccacctgtatctcttgttgggagaaaagctgagtgttgggagaagctgaggccgagcttgcatgtctgacataatgtaaaagagtcttgaatcatgtccaggatccagggtctaaaaccccttgtggcctttggaacaccaagctctgtgctgaagggtggaaggctaccctgacgcaccataatctaagcccggggcataaaacccctcgtgcttggatagaatccagggctcgtggctctggaatgtgtctggacttgctgcctcctcgctccttgctctcccaggatcaattgtatcttgagttaaaagaacctgctctccattatctcaagtagcagagcagatgctaaaccgtcacagctgtaaatcatgtggttaatgcaacatgccctttcgacccccacattctcaccacctgtttctttgtttgatcaccaataaataatctgcacttccagagctcggggccttcacagcctccatccttagctttggcgccctggacccactttctctctcaaactgtcttttctcactgctttgactctgccggactttgtcacccccacgacctggtgttgggtctgaacaccccaacatccctgaatctccacccaccc

SEQ ID NO: 1437 - DNA, 1203 bp; single-stranded, linear
  immediate source library: GENBANK
  immediate source clone: g536919
ggacgctgatgcgtttgggttctcgtctgcagaccctctggacctggtcacgattccataatgtaccacaacagtagtcagaagcggcactggaccttctccagcgaggagcagctggcaagactgcgggctgacgccaaccgcaaattcagatgcaaagccgtggccaacgggaaggttcttccgaatgatccagtctttcttgagcctcatgaagaaatgacactctgcaaatactatgagaaaaggttattggaattctgttcggtgtttaagccagcaatgccaagatctgttgtgggtacggcttgtatgtatttcaaacgtttttatcttaataactcagtaatggaatatcaccccaggataataatgctcacttgtgcatttttggcctgcaaagtagatgaattcaatgtatctagtcctcagtttgttggaaacctccgggagagtcctcttggacaggagaaggcacttgaacagatactggaatatgaactacttcttatacagcaacttaatttccaccttattgtccacaatccttacagaccatttgagggcttcctcatcgacttaaagacccgctatcccatattggagaatccagagattttgaggaaaacagctgatgactttcttaatagaattgcattgacggatgcttaccttttatacacaccttcccaaattgccctgactgccattttatctagtgcctccagggctggaattactatggaaagttatttatcagagagtctgatgctgaaagagaacagaacttgcctgtcacagttactagatataatgaaaagcatgagaaacttagtaaagaagtatgaaccacccagatctgaagaagttgctgttctgaaacagaagttggagcgatgtcattctgctgagcttgcacttaacgtaatcacgaagaagaggaaaggctatgaagatgatgattacgtctcaaagaaatccaaacatgaggaggaagaatggactgatgacgacctggtagaatctctctaaccatttgaagttgatttctcaatgctaactaatcaagagaagtaggaagcatatcaaacgtttaactttatttaaaaagtataatgtgaaaacataaaatatattaaaacttttctattgttttctttccctttcacagtaactttatgtaaaataaaccatcttcaaaag

SEQ ID NO: 1438 - DNA, 636 bp; single-stranded, linear
  immediate source library: GENBANK
  immediate source clone: g545022
accatggccccctttgagcccctggcttctggcatcctgttgttgctgtggctgatagcccccagcagggcctgcacctgtgtcccaccccacccacagacggccttctgcaattccgacctcgtcatcagggccaagttcgtggggacaccagaagtcaaccagaccaccttataccagcgttatgagatcaagatgaccaagatgtataaagggttccaagccttaggggatgccgctgacatccggttcgtctacacccccgccatggagagtgtctgcggatacttccacaggtcccacaaccgcagcgaggagtttctcattgctggaaaactgcaggatggactcttgcacatcactacctgcagttttgtggctccctggaacagcctgagcttagctcagcgccggggcttcaccaagacctacactgttggctgtgaggaatgcacagtgtttccctgtttatccatcccctgcaaactgcagagtggcactcattgcttgtggacggaccagctcctccaaggctctgaaaagggcttccagtcccgtcaccttgcctgcctgcctcgggagccagggctgtgcacctggcagtccctgcggtcccagatagcctgaatcctgccc

SEQ ID NO: 1439 - DNA, 833 bp; single-stranded, linear
  immediate source library: GENBANK
  immediate source clone: g545708
aaaccagcctcatgtgacaaagcgcaggacccctcactgccccaactgcttgctgttctctctttcttgggctctaaggacccaggagtctgggtgcacagcctccttctctctgagattcaagagtctgatcagcagcctcttcctcctccaggacccagaagccctgagcttatccccatggagctctgccggtccctggccctgctggggggctccctgggcctgatgttctgcctgattgctttgagcaccgatttctggtttgaggctgtgggtcccacccactcagctcactcgggcctctggccaacagggcatggggacatcatatcaggctacatccacgtgacgcagaccttcagcattatggctgttctgtgggccctggtgtccgtgagcttcctggtcctgtcctgcttcccctcactgttccccccaggccacggcccgcttgtctcaaccaccgcagcctttgctgcagccatctccatggtggtggccatggcggtgtacaccagcgagcggtgggaccagcctccacacccccagatccagaccttcttctcctggtccttctacctgggctgggtctcagctatcctcttgctctgtacaggtgccctgagcctgggtgctcactgtggcggtccccgtcctggctatgaaaccttgtgagcagaaggcaagagcggcaagatgagttttgagcgttgtattccaaaggcctcatctggagcctcgggaaagtctggtcctacatctgcccgcccttccagcccttccccagcccctcctcttgtttcttcattcattcaacaaaatttggctgg

SEQ ID NO: 1440 - DNA, 888 bp; single-stranded, linear
  immediate source library: GENBANK
  immediate source clone: g545772
ggctggtcccctgacaggttgaagcaagtagacgcccaggagccccgggagggggctgcagtttccttccttccttctcggcagcgctccgcgcccccatcgcccctcctgcgctagcggaggtgatcgccgcggcgatgccggaggagggttcgggctgctcggtgcggcgcaggccctatgggtgcgtcctgcgggctgctttggtcccattggtcgcgggcttggtgatctgcctcgtggtgtgcatccagcgcttcgcacaggctcagcagcagctgccgctcgagtcacttgggtgggacgtagctgagctgcagctgaatcacacaggacctcagcaggaccccaggctatactggcaggggggcccagcactgggccgctccttcctgcatggaccagagctggacaaggggcagctacgtatccatcgtgatggcatctacatggtacacatccaggtgacgctggccatctgctcctccacgacggcctccaggcaccaccccaccaccctggccgtgggaatctgctctcccgcctcccgtagcatcagcctgctgcgtctcagcttccaccaaggttgtaccattgcctcccagcgcctgacgcccctggcccgaggggacacactctgcaccaacctcactgggacacttttgccttcccgaaacactgatgagaccttctttggagtgcagtgggtgcgcccctgaccactgctgctgattagggttttttaaattttattttattttatttaagttcaagagaaaaagtgtacacacaggggccacccggggttggggtgggagtgtggtggggggtagtggtggcaggacaagagaaggcattgagctttttctttcattttcctattaaaaa

SEQ ID NO: 1441 - DNA, 8287 bp; single-stranded, linear
  immediate source library: GENBANK
  immediate source clone: g557287
ctgattatgaagtgcctcagagccaacctattaagcttggagatcatctcaacagcatactgcttggaatgtgtgaggatgttatttacgctcgagtttctgttcggactgtgctggatgcttgcagtgcccacattaggaatagcaattgtgcaccctcattttcctacgtgaaacacttggtaaaactggttctgggaaatctttctggggtaatatgcacgtgtcactagctgaggccctggaggttcggggtggaccacttcaggaggaagaaatatgggctgtattaaatcaaagtgctgaaagtctccaagaattattcagaaaagtaagcctagctgatcctgctgcccttggcttcatcatttctccatggtctctgctgttgctgccatctggtagtgtgtcatttacagatgaaaatatttccaatcaggatcttcgagcattcactgcaccagaggttcttcaaaatcagtcactaacttctctctcagatgttgaaaagatccacatttattctcttggaatgacactgtattggggggctgattatgaagtgcctcagagccaacctattaagcttggagatcatctcaacagcatactgcttggaatgtgtgaggatgttatttacgctcgagtttctgttcggactgtgctggatgcttgcagtgcccacattaggaatagcaattgtgcaccctcattttcctacgtgaaacacttggtaaaactggttctgggaaatctttctgggacagatcagctttcctgtaacagtgaacaaaagcctgatcgaagccaggctattcgagatcgattgcgaggaaaaggattaccaacaggaagaagctctacttctgatgtactagacatacaaaagcctccactctctcatcagacctttcttaacaaagggcttagtaaatctatgggatttctgtccatcaaagatacacaagatgagaattatttcaaggacattttatcagataattctggacgtgaagattctgaaaatacattctccccttaccagttcaaaactagtggcccagaaaaaaaacccatccctggcattgatgtgctttctaagaagaagatctgggcttcatccatggacttgctttgtacagctgacagagacttctcttcaggagagactgccacatatcgtcgttgtcaccctgaggcagtaacagtgcggacttcaactactcctagaaaaaaggaggcaagatactcagatggaagtatagccttggatatctttggccctcagaaaatggatccaatatatcacactcgagaattgcccacctcctcagcaatatcaagtgctttggaccgaatccgagagagacaaaagaaacttcaggttctgagggaagccatgaatgtagaagaaccagttcgaagatacaaaacttatcatggtgatgtctttagtacctccagtgaaagtccatctattatttcctctgaatcagatttcagacaagtgagaagaagtgaagcctcaaagaggtttgaatccagcagtggtctcccaggggtagatgaaaccttaagtcaaggccagtcacagagaccgagcagacaatatgaaacaccctttgaaggcaacttaattaatcaagagatcatgctaaaacggcaagaggaagaactgatgcagctacaagccaaaatggcccttagacagtctcggttgagcctatatccaggagacacaatcaaagcgtccatgcttgacatcaccagggatccgttaagagaaattgccctagaaacagccatgactcaaagaaaactgaggaatttctttggccctgagtttgtgaaaatgacaattgaaccatttatatctttggatttgccacggtctattcttactaagaaagggaagaatgaggataaccgaaggaaagtaaacataatgcttctgaacgggcaaagactggaactgacctgtgataccaaaactatatgtaaagatgtgtttgatatggttgtggcacatattggcttagtagagcatcatttgtttgctttagctaccctcaaagataatgaatatttctttgttgatcctgacttaaaattaaccaaagtggccccagagggatggaaagaagaaccaaagaaaaagaccaaagccactgttaattttactttgtttttcagaattaaattttttatggatgatgttagtctaatacaacatactctgacgtgtcatcagtattaccttcagcttcgaaaagatattttggaggaaaggatgcactgtgatgatgagacttccttattgctggcatccttggctctccaggctgagtatggagattatcaaccagaggttcatggtgtgtcttactttagaatggagcactatttgcccgccagagtgatggagaaacttgatttatcctatatcaaagaagagttacccaaattgcataatacctatgtgggagcttctgaaaaagagacagagttagaatttttaaaggtctgccaaagactgacagaatatggagttcattttcaccgagtgcaccctgagaagaagtcacaaacaggaatattgcttggagtctgttctaaaggtgtccttgtgtttgaagttcacaatggagtgcgcacattggtccttcgctttccatggagggaaaccaagaaaatatctttttctaaaaagaaaatcacattgcaaaatacatcagatggaataaaacatggcttccagacagacaacagtaagatatgccagtacctgctgcacctctgctcttaccagcataagttccagctacagatgagagcaagacagagcaaccaagatgcccaagatattgagagagcttcgtttaggagcctgaatctccaagcagagtctgttagaggatttaatatgggacgagcaatcagcactggcagtctggccagcagcaccctcaacaaacttgctgttcgacctttatcagttcaagctgagattctgaagaggctatcctgctcagagctgtcgctttaccagccattgcaaaacagttcaaaagagaagaatgacaaagcttcatgggaggaaaagcctagagagatgagtaaatcataccatgatctcagtcaggcctctctctatccacatcggaaaaatgtcattgttaacatggaacccccaccacaaaccgttgcagagttggtgggaaaaccttctcaccagatgtcaagatctgatgcagaatctttggcaggagtgacaaaacttaataattcaaagtctgttgcgagtttaaatagaagtcctgaaaggaggaaacatgaatcagactcctcatccattgaagaccctgggcaagcatatgttctaggaatgactatgcatagttctggaaactcttcatcccaagtacccttaaaagaaaatgatgtgctacacaaaagatggagcatagtatcttcaccagaaagggagatcaccttagtgaacctgaaaaaagatgcaaagtatggcttgggatttcaaattattggtggggagaagatgggaagactggacctaggcatatttatcagttcagttgcccctggaggaccagctgacttggatggatgcttgaagccaggagaccgtttgatatctgtgaatagtgtgagtctggagggagtcagccaccatgctgcaattgaaattttgcaaaatgcacctgaagatgtgacacttgttatctctcagccaaaagaaaagatatccaaagtgccttctactcctgtgcatctcaccaatgagatgaaaaactacatgaagaaatcttcctacatgcaagacagtgctatagattcttcttccaaggatcaccactggtcacgtggtaccctgaggcacatctcggagaactcctttgggccgtctgggggcctgcgggaaggaagcctgagttctcaagattccaggactgagagtgccagcttgtctcaaagccaggtcaatggtttctttgccagccatttaggtgaccaaacctggcaggaatcacagcatggcagcccttccccatctgtaatatccaaagccaccgagaaagagactttcactgatagtaaccaaagcaaaactaaaaagccaggcatttctgatgtaactgattactcagaccgtggagattcagacatggatgaagccacttactccagcagtcaggatcatcaaacaccaaaacaggaatcttcctcttcagtgaatacatccaacaagatgaattttaaaactttttcttcatcacctcctaagcctggagatatctttgaggttgaactggctaaaaatgataacagcttggggataagtgtcacggtactgtttgacaagggaggtgtgaatacgagtgtcagacatggtggcatttatgtgaaagctgttattccccagggagcagcagagtctgatggtagaattcacaaaggtgatcgcgtcctagctgtcaatggagttagtctagaaggagccacccataagcaagctgtggaaacactgagaaatacaggacaggtggttcatctgttattagaaaagggacaatctccaacatctaaagaacatgtcccggtaaccccacagtgtaccctttcagatcagaatgcccaaggtcaaggcccagaaaaagtgaagaaaacaactcaggtcaaagactacagctttgtcactgaagaaaatacatttgaggtaaaattatttaaaaatagctcaggtctaggattcagtttttctcgagaagataatcttataccggagcaaattaatgccagcatagtaagggttaaaaagctctttcctggacagccagcagcagaaagtggaaaaattgatgtaggagatgttatcttgaaagtgaatggagcctctttgaaaggactatctcagcaggaagtcatatctgctctcaggggaactgctccagaagtattcttgcttctctgcagacctccacctggtgtgctaccggaaattgatactgcgcttttgaccccacttcagtctccagcacaagtacttccaaacagcagtaaagactcttctcagccatcatgtgtggagcaaagcaccagctcagatgaaaatgaaatgtcagacaaaagcaaaaaacagtgcaagtccccatccagaagagacagttacagtgacagcagtgggagtggagaagatgacttagtgacagctccagcaaacatatcaaattcgacctggagttcagctttgcatcagactctaagcaacatggtatcacaggcacagagtcatcatgaagcacccaagagtcaagaagataccatttgtaccatgttttactatcctcagaaaattcccaataaaccagagtttgaggacagtaatccttcccctctaccaccggatatggctcctgggcagagttatcaaccccaatcagaatctgcttcctctagttcgatggataagtatcatatacatcacatttctgaaccaactagacaagaaaactggacacctttgaaaaatgacttggaaaatcaccttgaagactttgaactggaagtagaactcctcattaccctaattaaatcagaaaaaggaagcctgggttttacagtaaccaaaggcaatcagagaattggttgttatgttcatgatgtcatacaggatccagccaaaagtgatggaaggctaaaacctggggaccggctcataaaggttaatgatacagatgttactaatatgactcatacagatgcagttaatctgctccgggctgcatccaaaacagtcagattagttattggacgagttctagaattacccagaataccaatgttgcctcatttgctaccggacataacactaacgtgcaacaaagaggagttgggtttttccttatgtggaggtcatgacagcctttatcaagtggtatatattagtgatattaatccaaggtccgtcgcagccattgagggtaatctccagctattagatgtcatccattatgtgaacggagtcagcacacaaggaatgaccttggaggaagttaacagagcattagacatgtcacttccttcattggtattgaaagcaacaagaaatgatcttccagtggtccccagctcaaagaggtctgctgtttcagctccaaagtcaaccaaaggcaatggttcctacagtgtggggtcttgcagccagcctgccctcactcctaatgattcattctccacggttgctggggaagaaataaatgaaatatcgtaccccaaaggaaaatgttctacttatcagataaagggatcaccaaacttgactctgcccaaagaatcttatatacaagaagatgacatttatgatgattcccaagaagctgaagttatccagtctctgctggatgttgtggatgaggaagcccagaatcttttaaacgaaaataatgcagcaggatactcctgtggtccaggtacattaaagatgaatgggaagttatcagaagagagaacagaagatacagactgcgatggttcacctttacctgagtattttactgaggccaccaaaatgaatggctgtgaagaatattgtgaagaaaaagtaaaaagtgaaagcttaattcagaagccacaagaaaagaagactgatgatgatgaaataacatggggaaatgatgagttgccaatagagagaacaaaccatgaagattctgataaagatcattcctttctgacaaacgatgagctcgctgtactccctgtcgtcaaagtgcttccctctggtaaatacacgggtgccaacttaaaatcagtcattcgagtcctgcggggtttgctagatcaaggaattccttctaaggagctggagaatcttcaagaattaaaacctttggatcagtgtctaattgggcaaactaaggaaaacagaaggaagaacagatataaaaatatacttccctatgatgctacaagagtgcctcttggagatgaaggtggctatatcaatgccagcttcattaagataccagttgggaaagaagagttcgtttacattgcctgccaaggaccactgcctacaactgttggagacttctggcagatgatttgggagcaaaaatccacagtgatagccatgatgactcaagaagtagaaggagaaaaaatcaaatgccagcgctattggcccaacatcctaggcaaaacaacaatggtcagcaacagacttcgactggctcttgtgagaatgcagcagctgaagggctttgtggtgagggcaatgacccttgaagatattcagaccagagaggtgcgccatatttctcatctgaatttcactgcctggccagaccatgatacaccttctcaaccagatgatctgcttacttttatctcctacatgagacacatccacagatcaggcccaatcattacgcactgcagtgctggcattggacgttcagggaccctgatttgcatagatgtggttctgggattaatcagtcaggatcttgattttgacatctctgatttggtgcgctgcatgagactacaaagacacggaatggttcagacagaggatcaatatattttctgctatcaagtcatcctttatgtcctgacacgtcttcaagcagaagaagagcaaaaacagcagcctcagcttctgaagtgacatgaaaagagcctctggatgcatttccatttctctccttaacctccagcagactcctgctctctatccaaaataagatcacagagcagcaagttcatacaacatgcatgttctcctctatcttagaggggtattcttcttgaaaataaaaaatattgaaatgctgtatttttacagctactttaacctatgataattatttacaaaattttaacactaaccaaacaatgcagatcttagggatgattaaaggcagcatttgatgatagcagacattgttacaaggacatggtgagtctatttttaatgcaccaatcttgtttatagcaaaaatgttttccaatattttaataaagtagttattttataggggatacttgaaaccagtatttaagctttaaatgacagtaatattggcatagaaaaaagtagcaaatgtttactgtatcaatttctaatgtttactatatagaatttcctgtaatatatttatatactttttcatgaaaatggagttatcagttatctgtttgttactgcatcatctgtttgtaatcattatctcactttgtaaataaaaacacaccttaaaacatg

SEQ ID NO: 1442 - DNA, 987 bp; single-stranded, linear
  immediate source library: GENBANK
  immediate source clone: g558656
cggagagggggagaacagacaacgggcggcggggagcagcatggagccggcggcggggagcagcatggagccttcggctgactggctggccacggccgcggcccggggtcgggtagaggaggtgcgggcgctgctggaggcgggggcgctgcccaacgcaccgaatagttacggtcggaggccgatccaggtcatgatgatgggcagcgcccgagtggcggagctgctgctgctccacggcgcggagcccaactgcgccgaccccgccactctcacccgacccgtgcacgacgctgcccgggagggcttcctggacacgctggtggtgctgcaccgggccggggcgcggctggacgtgcgcgatgcctggggccgtctgcccgtggacctggctgaggagctgggccatcgcgatgtcgcacggtacctgcgcgcggctgcggggggcaccagaggcagtaaccatgcccgcatagatgccgcggaaggtccctcagacatccccgattgaaagaaccagagaggctctgagaaacctcgggaaacttagatcatcagtcaccgaaggtcctacagggccacaactgcccccgccacaacccaccccgctttcgtagttttcatttagaaaatagagcttttaaaaatgtcctgccttttaacgtagatataagccttcccccactaccgtaaatgtccatttatatcattttttatatattcttataaaaatgtaaaaaagaaaaacaccgcttctgccttttcactgtgttggagttttctggagtgagcactcacgccctaagcgcacattcatgtgggcatttcttgcgagcctcgcagcctccggaagctgtcgacttcatgacaagcattttgtgaactagggaagctcaggggggttactggcttctcttgagtcacactgctagcaaatggcagaaccaaagctcaaataaaaataaaataattttcattcattcactc

SEQ ID NO: 1443 - DNA, 3805 bp; single-stranded, linear
  immediate source library: GENBANK
  immediate source clone: g559708
gagaatcaaaggttagcttatgttacatatcaagatattcgaaaaattagtggccttaaagaccaaactgttatagttgtgaaagcccctccagaaacaagacttgaagtgcctgactcaatagagagcctacaaatacatttggcaagtacccaagggcccattgaggtttacttatgtccagaagagactgaaacacacagtccaatgaaaacaaacaaccaagaccacaatgggaatatccctaaacccgcttccaaagacttggcttcaaccaactcaggacatagcgattgctcagtttctatgggaaacctttctcctctggcctccccagccaacctcttacagcagactgaggaccaaattccttccaacctagaaggaccgtttgtgaacttactgcctcccctgctgcaagaggactatctcctgagcctcggggaggaggaaggcatcagcgatctcttcgatgcttacgatttggaaaagctcccactggtggaagacttcatgtgtagttgattatgcttcgtgtgaactctccttaaaaaccgatatttttttatcatggaaccagaacatctgtcatgcagtgttgtcccttcctaccttcttcctccaagagagtatcatgaagtaaactacaaacttcagaagaaagctgacattttaatgaattttttaaaaaattaataaacaaattgtctaaacgcacagttgcaggctcccttgggaaagccctgctttgctccaggctccaagatctcctggctaagtcagcaagtgagaaaatgtgcaatcaggtgtctctcaccccgaattgtccttcctccttcctccccggattggcttgctgtgcctgacggatgggctgtagaatggggtctggccacctggcctgctgggaaacagcaatcttccttaatagcatttcaagccgtgccttctccgcagaatgcatgtctttgaggtctgctaatatggaatggaactgcagcaaatgcaaacttgaagtcatgcaaaagtatgaaatggatttcttcagctcttcttaggaatatttaaattactgtcataattcagtttaagctatgaactgtgtgtcccagtaggaggtcaagaaaacctccacagccttctggatgaagaacctgttttcaaatatacttgttgcagatacagaagactagtagagttctgccactctaagctgttgtggattttcctgtctccatgaaccactcccattcccccgtccccaatgtgtttgtgagtttccagttgatttgtagcaaatgcctacttagttctttgtggattgttctagacttttaatttttttagctgccatttaagcattcctgtggcacccatcaccatttcaatttaattgtttactttgaagcggtttttgcaaattcatattacttaagcagagggagagaacctctactgatcagagcatctaaacctgtgtgatctaaggtttatcagcctctgcaaggagctttgtcccatcgtgcttccattcccaggagggggagcttggagcgagtcagtcctggggcttgctgacatgggtggcccattggaaaggagaaccaggtcagatgatgtaacagccccaaggagcagcaggcatgggtccctccatccttgggcttcccgggcccctgtgacaggggaaagggctctcttacaccgcactcagggagaccacttctcaggatggggtcagatggagagacctctagggagaaagacatccccattgtgtgagtggcatttccttaagctggcaggaacagggagcagccctgtgtcgggggctggaatagttctggccagaccccgttccccttcctctatgaaggaataagttggaccaagggaagtcggggacgtaaaaaatgaagcaaaacaatgccagggtgtctcccgctttactcttcaggaatggtgtcccaagttggaggctttgtgtcagctgcaaatcctaccagttatgtccaagaatggctttccctcgggcaggtggcagcggccatctcccactgggaatatggcgtagtatctccggtccattccttggatgctaaggactgcgggaatgagggagtcagataaagaacaaacctcgaaacgaacagttaaattgaaatgctatgtgcctgacccaatggtaggcacatagtaggcactcaactcatatgtttaattgaattgaaaatatcccttaggaaaaaaaaaaaacacacaaaaaaccacaagagccccagccagtttactccaggtagatttccacaatatgcaaagtggtggtggggtcaagacagatgacaccagcactttaaactctttgtgtgggtatgcgtgggtgtatgtttgggaagaaaaacaaaggtgcagactatcttcctttttttcttcttcagcctccatccctggcctcctcccctcacacacactggacttggtacaaaatgtcggtgtggtcctagatgaagcattggggtgggggagggagagggagctttgtgttaagtgcctactggaaatgcactgtggggttttttcctgtatgggaaaccatttatgccaagcttttccccatttcccatatttatctcatctggttagctgcctctgcttccagctttgtgtaattctctttgccagctgcacaaagctgattttttccaaagtctaaagactgagctcacctggctagattgttgtgtgttttgttgaattttttcataatgtaatgccgtatttattgtttttaaaatgaaaggaatactaataagtcttaaaagttccttcatgcataagatttttttccagttactgggcttaactggtgtacattaattagatgtccatactgtattttgtttgcattaagtaattttctttttgacttagtatccggcacacaaagtgggttagtactacagtatttgcgttactttaagtactaagtatgcaggtttcctggtaccattgagttgctgctattaaagctcacacacgaaatggctaaaagttacaagtgtgcaaattatgactgcgtgagccttagaaaataaaatgtataaagggcaacacatgagctgtcaaacagtgttaggagtgtgtttatatgtacagagttgtgcatagcaatcgttttatttaagttgatatgtagtctactcacattttcattatttagcaattttgtacaaaaatagcaattaatttgtaaacactgccagaatactttctagctgctttgtaattttttaagagtgttattttgtttttgtttttctgttctttgttgtggctcttgttttcatttttgttgtacgtgtagatctgtaaataaaattgcagtatttaaagcttaagctttcaggaaaaagaaaataagaattcagtgtgtgcatgacaactcgtgtgtatgagaaggagggatatgaaggaagatggcttgcagagtaagtcgggtggcaattgtcagggtgtgggaatttcttttcctacggggtacgtgattttgtaaaaaggaagtatttctcccaaaattgggagtaggcaaactactaatcagtttagctttgtgttgtatgctagtttaaaaaagaaaatatgtaatataatgtaaaaaaaaacaaaaaaaagcttttatgatggattttgtaaatagatttgttacagggtgacctgttctctagctgtgatcttaccacttcaaatgggtgtaatttgaataaattttgtatggtaaaggatcaataaaatgattttttttaag

SEQ ID NO: 1444 - DNA, 3046 bp; single-stranded, linear
  immediate source library: GENBANK
  immediate source clone: g559854
atcttatttttctttttggtggtggtggtggaaggggggaggtgctagcagggccagccttgaactcgctggacagagctacagacctatggggcctggaagtgcccgctgagaaagggagaagacagcagaggggttgccgaggcaacctccaagtcccagatcatgtctctgtggggtctggtctccaagatgcccccagaaaaagtgcagcggctctatgtcgactttccccaacacctgcggcatcttctgggtgactggctggagagccagccctgggagttcctggtcggctccgacgccttctgctgcaacttggctagtgccctactttcagacactgtccagcaccttcaggcctcggtgggagagcagggggaggggagcaccatcttgcaacacatcagcacccttgagagcatatatcagagggaccccctgaagctggtggccactttcagacaaatacttcaaggagagaaaaaagctgttatggaacagttccgccacttgccaatgcctttccactggaagcaggaagaactcaagtttaagacaggcttgcggaggctgcagcaccgagtaggggagatccaccttctccgagaagccctgcagaagggggctgaggctggccaagtgtctctgcacagcttgatagaaactcctgctaatgggactgggccaagtgaggccctggccatgctactgcaggagaccactggagagctagaggcagccaaagccctagtgctgaagaggatccagatttggaaacggcagcagcagctggcagggaatggcgcaccgtttgaggagagcctggccccactccaggagaggtgtgaaagcctggtggacatttattcccagctacagcaggaggtaggggcggctggtggggagcttgagcccaagacccgggcatcgctgactggccggctggatgaagtcctgagaaccctcgtcaccagttgcttcctggtggagaagcagcccccccaggtactgaagactcagaccaagttccaggctggagttcgattcctgttgggcttgaggttcctgggggccccagccaagcctccgctggtcagggccgacatggtgacagagaagcaggcgcgggagctgagtgtgcctcagggtcctggggctggagcagaaagcactggagaaatcatcaacaacactgtgcccttggagaacagcattcctgggaactgctgctctgccctgttcaagaacctgcttctcaagaagatcaagcggtgtgagcggaagggcactgagtctgtcacagaggagaagtgcgctgtgctcttctctgccagcttcacacttggccccggcaaactccccatccagctccaggccctgtctctgcccctggtggtcatcgtccatggcaaccaagacaacaatgccaaagccactatcctgtgggacaatgccttctctgagatggaccgcgtgccctttgtggtggctgagcgggtgccctgggagaagatgtgtgaaactctgaacctgaagttcatggctgaggtggggaccaaccgggggctgctcccagagcacttcctcttcctggcccagaagatcttcaatgacaacagcctcagtatggaggccttccagcaccgttctgtgtcctggtcgcagttcaacaaggagatcctgctgggccgtggcttcaccttttggcagtggtttgatggtgtcctggacctcaccaaacgctgtctccggagctactggtctgaccggctgatcattggcttcatcagcaaacagtacgttactagccttcttctcaatgagcccgacggaacctttctcctccgcttcagcgactcagagattgggggcatcaccattgcccatgtcatccggggccaggatggctctccacagatagagaacatccagccattctctgccaaagacctgtccattcgctcactgggggaccgaatccgggatcttgctcagctcaaaaatctctatcccaagaagcccaaggatgaggctttccggagccactacaagcctgaacagatgggtaaggatggcaggggttatgtcccagctaccatcaagatgaccgtggaaagggaccaaccacttcctaccccagagctccagatgcctaccatggtgccttcttatgaccttggaatggcccctgattcctccatgagcatgcagcttggcccagatatggtgccccaggtgtacccaccacactctcactccatccccccgtatcaaggcctctccccagaagaatcagtcaacgtgttgtcagccttccaggagcctcacctgcagatgccccccagcctgggccagatgagcctgccctttgaccagcctcacccccagggcctgctgccgtgccagcctcaggagcatgctgtgtccagccctgaccccctgctctgctcagatgtgaccatggtggaagacagctgcctgagccagccagtgacagcgtttcctcagggcacttggattggtgaagacatattccctcctctgctgcctcccactgaacaggacctcactaagcttctcctggaggggcaaggggagtcggggggagggtccttgggggcacagcccctcctgcagccctcccactatgggcaatctgggatctcaatgtcccacatggacctaagggccaaccccagttggtgatcccagctggagggagaacccaaagagacagctcttctactacccccacagacctgctctggacacttgctcatgccctgccaagcagcagatggggagggtgccctcctatccccacctactcctgggtcaggaggaaaagactaacaggagaatgcacagtgggtggagccaatccactccttcctttctatcattcccctgcccacctccttccagcactgactggaagggaagttcaggctctgagacacgccccaacatgcctgcacctgcagcgcgcacacgcacgcacacacacatacagagctctctgagggtgatggggctgagcagg

SEQ ID NO: 1445 - DNA, 357 bp; single-stranded, linear
  immediate source library: GENBANK
  immediate source clone: g561629
atgtccgggggcagcagctgcagccagaccccaagccgggccatccccgccactcgccgggtggtgctcggcgacggcgtgcagctcccgcccggggactacagcacgacccccggcggcacgctcttcagcaccaccccgggaggtaccaggatcatctatgaccggaaattcctgatggagtgtcggaactcacctgtgaccaaaacacccccaagggatctgcccaccattccgggggtcaccagcccttccagtgatgagccccccatggaagccagccagagccacctgcgcaatagcccagaagataagcgggcgggcggtgaagagtcacagtttgagatggacatttaa

SEQ ID NO: 1446 - DNA, 2635 bp; single-stranded, linear
  immediate source library: GENBANK
  immediate source clone: g561665
gaattcggcacgaggggtgctattgtgaggcggttgtagaagagtttcgtgagtgctcgcagctcatacctgtggctgtgtatccgtggccacagctggttggcgtcgccttgaaatcccaggccgtgaggagttagcgagccctgctcacactcggcgctctggttttcggtgggtgtgccctgcacctgcctcttcccccattctcattaataaaggtatccatggagaacactgaaaactcagtggattcaaaatccattaaaaatttggaaccaaagatcatacatggaagcgaatcaatggactctggaatatccctggacaacagttataaaatggattatcctgagatgggtttatgtataataattaataataagaattttcataaaagcactggaatgacatctcggtctggtacagatgtcgatgcagcaaacctcagggaaacattcagaaacttgaaatatgaagtcaggaataaaaatgatcttacacgtgaagaaattgtggaattgatgcgtgatgtttctaaagaagatcacagcaaaaggagcagttttgtttgtgtgcttctgagccatggtgaagaaggaataatttttggaacaaatggacctgttgacctgaaaaaaataacaaactttttcagaggggatcgttgtagaagtctaactggaaaacccaaacttttcattattcaggcctgccgtggtacagaactggactgtggcattgagacagacagtggtgttgatgatgacatggcgtgtcataaaataccagtggatgccgacttcttgtatgcatactccacagcacctggttattattcttggcgaaattcaaaggatggctcctggttcatccagtcgctttgtgccatgctgaaacagtatgccgacaagcttgaatttatgcacattcttacccgggttaaccgaaaggtggcaacagaatttgagtccttttcctttgacgctacttttcatgcaaagaaacagattccatgtattgtttccatgctcacaaaagaactctatttttatcactaaagaaatggttggttggtggttttttttagtttgtatgccaagtgagaagatggtatatttggtactgtatttccctctcattttgacctactctcatgctgcagagggtactttaagacatactccttccatcaaatagaaccactatgaagctacctcaaacttccagtcaggtagttgcaattgaattaaattaggaataaataaaaatggatactggtgcagtcattatgagaggcaatgattgttaatttacagctttcatgattagcaagttacagtgatgctgtgctatgaattttcaagtaattgtgaaaaagttaaacattgaagtaatgaatttttatgatattccccccacttaagactgtgtattctagttttgtcaaactgtagaaatgatgatgtggaagaacttaggcatctgtgggcatggtcaaaggctcaaacctttattttagaattgatatacacggatgacttaactgcattttagaccatttatctgggattatggttttgtgatgtttgtcctgaacacttttgttgtaaaaaaataataataataatgtttaatattgagaaagaaactaatattttatgtgagagaaagtgtgagcaaactaacttgacttttaaggctaaaacttaacattcatagaggggtggagttttaactgtaaggtgctacaatgcccctggatctaccagcataaatatcttctgatttgtccctatgcatatcagttgagcttcatataccagcaatatatctgaagagctattatataaaaaccccaaactgttgattattagccaggtaatgtgaataaattctataggaacatatgaaaatacaacttaaataataaacagtggaatataaggaaagcaataaatgaatgggctgagctgcctgtaacttgagagtagatggtttgagcctgagcagagacatgactcagcctgttccatgaaggcagagccatggaccacgcaggaagggcctacagcccatttctccatacgcactggtatgtgtggatgatgctgccagggcgccatcgccaagtaagaaagtgaagcaaatcagaaacttgtgaagtggaaatgttctaaaggtggtgaggcaataaaaatcatagtactctttgtagcaaaattcttaagtatgttattttctgttgaagtttacaatcaaaggaaaatagtaatgttttatactgtttactgaaagaaaaagacctatgagcacataggactctagacggcatccagccggaggccagagctgagcactcagcccgggaggcaggctccaggcctcagcaggtgcggagccgtcactgcaccaagtctcactggctgtcagtatgacatttcacgggagatttcttgttgctcaaaaaatgagctcgcatttgtcaatgacagtttcttttttcttactagacctgtaacttttgtaaatacacacagcatgtaatggtatcttaaagtgtgtttctatgtgacaattttgtacaaatttgttattttccatttttatttcaaaatatacattcaaacttaaaatt

SEQ ID NO: 1447 - DNA, 4238 bp; single-stranded, linear
  immediate source library: GENBANK
  immediate source clone: g562752
gcgctctcaggcgggctccggcggcagcgacgcgagcgcggcgatggggagcggcggcgtggtccactgtaggtgtgccaagtgtttctgttatcctacaaagcgaagaataaggaggaggccccgaaacctgaccatcttgagtctccccgaagatgtgctctttcacatcctgaaatggctttctgtagaggacatcctggccgtccgagctgtacactcccagctgaaggacctggtggacaaccacgccagtgtgtgggcatgtgccagcttccaggagctgtggccgtctccagggaacctgaagctctttgaaagggctgctgaaaaggggaatttcgaagctgctgtgaagctgggcatagcctacctctacaatgaaggcctgtctgtgtctgatgaggcccgcgcagaagtgaatggcctgaaggcctctcgcttcttcagtctcgctgagcggctgaatgtgggtgccgcacctttcatctggctcttcatccgccctccgtggtcggtgagcggaagctgctgcaaggccgtggttcacgagagcctcagggcagagtgccagctgcagaggactcacaaagcatccatattgcactgcttgggcagagtgctgagtctgttcgaggatgaggagaagcagcagcaggcccatgacctgtttgaggaggctgctcatcagggatgtctgaccagctcctacctcctctgggaaagcgacaggaggacagatgtgtcagatcctgggcgatgcctccacagcttccgaaaactcagggactacgctcgcaaaggctgctgggaagcgcagctgtctttagccaaagcctgtgcaaatgcaaaccagcttggactggaggtgagagcttccagtgagatcgtctgccagctatttcaggcttcccaggctgtcagtaaacaacaagtcttctccgtgcagaagggactcaatgacacaatgaggtacattctgatcgactggctggtggaagttgccaccatgaatgacttcacaagcctgtgcctgcacctgaccgtggagtgtgtggaccggtacctgcggaggaggctggtgccgcggtacaggctccagctgctgggcatcgcctgcatggtcatctgcacccggtttatcagtaaagagatcctgaccatccgggaggccgtatggctcacggacaacacttacaagtacgaggacctggtgagaatgatgggcgagatcgtctccgccttggaagggaagattcgagtccccactgtggtggattacaaggaggtcctgctgacgctagtccctgtggagctgagaacccagcacctgtgcagcttcctctgcgagctctccctgctgcacaccagcctgtccgcctacgccccagcccgcctggctgccgcagccctgctcctggccagactgacgcacgggcagacacagccctggaccactcagctgtgggacctcaccggattctcctatgaagacctcattccctgcgtcttgagcctccataagaagtgcttccatgatgacgcccccaaggactacaggcaagtctctctgaccgccgtgaagcagcggtttgaggacaagcgctatggagaaatcagccaggaagaggtgctgagctacagccagttgtgtgctgcattaggagtgacacaagacagccccgaccccccgactttcctcagcacaggggagatccacgccttcctcagctctccctcggggcggagaaccaaacggaagcgggagaacagcctccaggaagacagaggcagcttcgttaccacccccactgcggagctgtccagccaggaggagaccgtgctgggcagcttcctcgactggagcctggactgctgctctggctatgaaggcgaccaggagagtgagggcgagaaggagggcgacgtgacagctcccagcggcatcctcgatgtcaccgtggtctacctgaacccagaacagcattgctgccaggaatccagtgatgaggaggcttgtccagaggcaaagggaccccaggacccacaggcactggcgctggacacccagatccctgcaacccctggacccaaacccctggtccgcaccagccgggagccagggaaggacgtcacgacctcagggtactcctccgtcagcaccgcaagtcccacaagctccgtggacggtggcttgggggccctgccccaacctacctcagtgctgtccctgcacagtgactcgcacacacagccctgccaccatcaggccaggaagtcatgtttacagtgtcgtcccccaagtcccccggagagcagtgttccccagcaacaggtgaagcggataaacctatgcatacacagtgaggaggaggacatgaacctgggccttgtgaggctgtaagtgtgtcagcacatttgccgcagtggatgtgtactgagggggctggaggcgaagggtgggagcatagcataggaacgctgcatagaccatggaggcctttgcgcagagagcagagaggatgacttgcggccaccaagtttctgtctccgcgggagtcccgtgcaagccatcagaatgttgaaatgagggtgaagagctcagatccctctctttggaaagtttagcctggaagcagttggccacactgtgtggagggcacctctctgtcccttccgtgtctcactgtctctggaagcttcagcccatgtgtgtcctggtgttcccagccccaccagagccccgtgccgggagctgacagctttcacgcttaaggcacgtgtgacctgggtagtcagacaccacttgagcccctgcccacatctgctggtttggggcttcagtggggagctgacagctgtgagcacaccactgtcccctcatccacctcggcctgcatggggcacccacttccttctgggtggggcttccatggtaagggggcctgcgtccctgcacactgcgaggactgccttgccacaggcccactccctacgacacgtgactcgttttagagctctgtcccagaggcgttcgtatgtgacccacagatggcgtcaatgtgaacacctctctttgtgctgaatttctgggccattcttttcctgtcttatttctaaatttccttcttccaagatgaaaacaaaagaaaaacttaaaacagaaggtattaaaaaaacaagagattcccaccattatttaggttcacctgcaaaacaaaaatcttactccagcccctcaatgccatcctgacacactttatgcaaaaagaattttcccagataggctagccagaaaaaacttcaagtcctctgtaacatctgaggtgaccaagaggcagaagagcagagcagtcgggggccgtgtcctggctgatcccaactgcagctctgctgtgggggcccgtgggagggaggcagacccctgggctttcctgctggccacggagactctgctcctgcatggaaagggagcctgggagccagcagcccacgcctggggagcctgcctggggccatgtgaccatggcctctccctgggaacgggctgaccacaacacaccctgctgccatccacttctgtttactctgcaaatgtaagaaagaaccacttggccagaagtgtcccccagatgcttttttttttttttttttggagacagttttgctcttgtctccccggctggagtgcagtggcatgatctcaactctcaactcactgtaacctccgcctcccggatactcctgcctcagcctcctgggtagctgggattacaagcacccaaccacgcccagctaatttttgtattttcggtagagacgggatttcaccatgttggccaggctagtctcgaactcatgacctcaagtgatccgcccacttcggtctcccaaagtgctgggattacaggcatgagccacggcgcctggcccccaaatgctcttgaaccggaaacccagggatgggagatgctcactgagctgctgcttttatgtgtgctggtgctatgtgtgttcatgtccgcggcagctgtctttttgctactataagggaattctggccaccctgggtggggtgtggtcggggtgagaacccaagcgttggaactgtagacccgtcctgtcgactgtgtgcccctgggcatgtgtgagcctcagtttcctcatctgtaaggggggcaatgatacctacctcacagggggttgtgaggattaaatgtgaggaggatagtggcaac

SEQ ID NO: 1448 - DNA, 498 bp; single-stranded, linear
  immediate source library: GENBANK
  immediate source clone: g563700
ttaaagcaaagaattccccggtcccagccatgtccaacgtcccccacaagtcctcgctgcccgagggcatccgccctggcacggtgctgagaattcgcggcttggttcctcccaatgccagcaggttccatgtaaacctgctgtgcggggaggagcagggctccgatgccgccctgcatttcaacccccggctggacacgtcggaggtggtcttcaacagcaaggagcaaggctcctggggccgcgaggagcgcgggccgggcgttcctttccagcgcgggcagcccttcgaggtgctcatcatcgcgtcagacgacggcttcaaggccgtggttggggacgcccagtaccaccacttccgccaccgcctgccgctggcgcgcgtgcgcctggtggaggtgggcggggacgtgcagctggactccgtgaggatcttctgagcagaagcccaggcggcccggggccttggctggcaaataaagcgttagcccgcagcgc

SEQ ID NO: 1449 - DNA, 2094 bp; single-stranded, linear
  immediate source library: GENBANK
  immediate source clone: g595923
gaggatctacaggggacaagtaaaggctacatccagatgccgggaatgcactgacgcccattcctggaaactgggctcccactcagcccctgggagcagcagccgccagcccctcggacctccatctccaccctgctgagccacccgggttgggccaggatcccggcaggctgatcccgtcctccactgagacctgaaaaatggcttcggggcaaggcccaggtcctcccaggcaggagtgcggagagcctgccctgccctctgcttctgaggagcaggtagcccaggacacagaggaggttttccgcagctacgttttttaccgccatcagcaggaacaggaggctgaaggggtggctgcccctgccgacccagagatggtcaccttacctctgcaacctagcagcaccatggggcaggtgggacggcagctcgccatcatcggggacgacatcaaccgacgctatgactcagagttccagaccatgttgcagcacctgcagcccacggcagagaatgcctatgagtacttcaccaagattgccaccagcctgtttgagagtggcatcaattggggccgtgtggtggctcttctgggcttcggctaccgtctggccctacacgtctaccagcatggcctgactggcttcctaggccaggtgacccgcttcgtggtcgacttcatgctgcatcactgcattgcccggtggattgcacagaggggtggctgggtggcagccctgaacttgggcaatggtcccatcctgaacgtgctggtggttctgggtgtggttctgttgggccagtttgtggtacgaagattcttcaaatcatgactcccaagggtgccctttgggtcccggttcagacccctgcctggacttaagcgaagtctttgccttctctgttcccttgcagggtcccccctcaagagtacagaagctttagcaagtgtgcactccagcttcggaggccctgcgtgggggccagtcaggctgcagaggcacctcaacattgcatggtgctagtgccctctctctgggcccagggctgtggccgtctcctccctcagctctctgggacctccttagccctgtctgctaggcgctggggagactgataacttggggaggcaagagactgggagccacttctccccagaaagtgtttaacggttttagctttttataatacccttgtgagagcccattcccaccattctacctgaggccaggacgtctggggtgtggggattggtgggtctatgttccccaggattcagctattctggaagatcagcaccctaagagatgggactaggacctgagcctggtcctggccgtccctaagcatgtgtcccaggagcaggacctactaggagaggggggccaaggtcctgctcaactctacccctgctcccattcctccctccggccatactgcctttgcagttggactctcagggattctgggcttggggtgtggggtggggtggagtcgcagaccagagctgtctgaactcacgtgtcagaagcctccaagcctgcctcccaaggtcctctcagttctctcccttcctctctccttatagacacttgctcccaacccattcactacaggtgaaggctctcacccatccctgggggccttgggtgagtggcctgctaaggctcctccttgcccagactacagggcttaggacttggtttgttatatcagggaaaaggagtagggagttcatctggagggttctaagtgggagaaggactatcaacaccactaggaatcccagaggtggatcctccctcatggctctggcacagtgtaatccaggggtgtagatgggggaactgtgaatacttgaactctgttcccccaccctccatgctcctcacctgtctaggtctcctcagggtggggggtgacagtgccttctctattggcacagcctagggtcttgggggtcaggggggagaagttcttgattcagccaaatgcagggaggggaggcagatggagcccataggccaccccctatcctctgagtgtttggaaataaactgtgcaatcccctcaaaaaaaaaacggagatcc

SEQ ID NO: 1450 - DNA, 504 bp; single-stranded, linear
  immediate source library: GENBANK
  immediate source clone: g598632
ggagctggcctatcaggaagccatgttcaatatggctaccctcaacagaactgctgcaggtttaatgcacacatttaatgcccatgcggccacagatatcacaggctttggcattctaggacactcccagaaccttgcaaaacaacaaagaaatgaagtgtcctttgttattcataatctgccaataattgccaagatggctgccgtcagcaaggccagtggacggtttgggcttcttcaaggaacctcagctgaaacctctgggggattactgatttgtctgccaagagaacaggcggctcgcttttgttctgaaatcaaatcctccaagtacggagagggtcaccaagcgtggatcgttggcattgtggaaaagggaaaccgaacggcccggttcattgacaagccgcgagttattgaagtcctgcctcgtggggccacagctgctgttcttgctcctgacagttcaaatgcctcctctgagcctagctcgtgagatgaaac

SEQ ID NO: 1451 - DNA, 226 bp; single-stranded, linear
  immediate source library: GENBANK
  immediate source clone: g598684
gatctgttctttgagctaaaaaccatgtgctgtaccaagagtttgctcctggctgctttgatgtcagtgctgctactccacctctgcggcgaatcagaagcagcaagcaactttgactgctgtcttggatacacagaccgtattcttcatcctaaatttattgtgggcttcacacggcagctggccaatgaaggctgtgacatcaatgctatcatctttcacacaa

SEQ ID NO: 1452 - DNA, 4000 bp; single-stranded, linear
  immediate source library: GENBANK
  immediate source clone: g599833
gcacgatctgttcctcctgggaagatgcagaggctcatgatgctcctcgccacatcgggcgcctgcctgggcctgctggcagtggcagcagtggcagcagcaggtgctaaccctgcccaacgggacacccacagcctgctgcccacccaccggcgccaaaagagagattggatttggaaccagatgcacattgatgaagagaaaaacacctcacttccccatcatgtaggcaagatcaagtcaagcgtgagtcgcaagaatgccaagtacctgctcaaaggagaatatgtgggcaaggtcttccgggtcgatgcagagacaggagacgtgttcgccattgagaggctggaccgggagaatatctcagagtaccacctcactgctgtcattgtggacaaggacactggtgaaaacctggagactccttccagcttcaccatcaaagttcatgacgtgaacgacaactggcctgtgttcacgcatcggttgttcaatgcgtccgtgcctgagtcgtcggctgtggggacctcagtcatctctgtgacagcagtggatgcagacgaccccactgtgggagaccacgcctctgtcatgtaccaaatcctgaaggggaaagagtattttgccatcgataattctggacgtattatcacaataacgaaaagcttggaccgagagaagcaggccaggtatgagatcgtggtggaagcgcgagatgcccagggcctccggggggactcgggcacggccaccgtgctggtcactctgcaagacatcaatgacaacttccccttcttcacccagaccaagtacacatttgtcgtgcctgaagacacccgtgtgggcacctctgtgggctctctgtttgttgaggacccagatgagccccagaaccggatgaccaagtacagcatcttgcggggcgactaccaggacgctttcaccattgagacaaaccccgcccacaacgagggcatcatcaagcccatgaagcctctggattatgaatacatccagcaatacagcttcatcgtcgaggccacagaccccaccatcgacctccgatacatgagccctcccgcgggaaacagagcccaggtcattatcaacatcacagatgtggacgagccccccattttccagcagcctttctaccacttccagctgaaggaaaaccagaagaagcctctgattggcacagtgctggccatggaccctgatgcggctaggcatagcattggatactccatccgcaggaccagtgacaagggccagttcttccgagtcacaaaaaagggggacatttacaatgagaaagaactggacagagaagtctacccctggtataacctgactgtggaggccaaagaactggattccactggaacccccacaggaaaagaatccattgtgcaagtccacattgaagttttggatgagaatgacaatgccccggagtttgccaagccctaccagcccaaagtgtgtgagaacgctgtccatggccagctggtcctgcagatctccgcaatagacaaggacataacaccacgaaacgtgaagttcaaattcaccttgaatactgagaacaactttaccctcacggataatcacgataacacggccaacatcacagtcaagtatgggcagtttgaccgggagcataccaaggtccacttcctacccgtggtcatctcagacaatgggatgccaagtcgcacgggcaccagcacgctgaccgtggccgtgtgcaagtgcaacgagcagggcgagttcaccttctgcgaggatatggccgcccaggtgggcgtgagcatccaggcagtggtagccatcttactctgcatcctcaccatcacagtgatcaccctgctcatcttcctgcggcggcggctccggaagcaggcccgcgcgcacggcaagagcgtgccggagatccacgagcagctggtcacctacgacgaggagggcggcggcgagatggacaccaccagctacgatgtgtcggtgctcaactcggtgcgccgcggcggggccaagcccccgcggcccgcgctggacgcccggccttccctctatgcgcaggtgcagaagccaccgaggcacgcgcctggggcacacggagggcccggggagatggcagccatgatcgaggtgaagaaggacgaggcggaccacgacggcgacggccccccctacgacacgctgcacatctacggctacgagggctccgagtccatagccgagtccctcagctccctgggcaccgactcatccgactctgacgtggattacgacttccttaacgactggggacccaggtttaagatgctggctgagctgtacggctcggacccccgggaggagctgctgtattaggcggccgaggtcactctgggcctggggacccaaaccccctgcagcccaggccagtcagactccaggcaccacagcctccaaaaatggcagtgactccccagcccagcaccccttcctcgtgggtcccagagacctcatcagccttgggatagcaaactccaggttcctgaaatatccaggaatatatgtcagtgatgactattctcaaatgctggcaaatccaggctggtgttctgtctgggctcagacatccacataaccctgtcacccacagaccgccgtctaactcaaagacttcctctggctccccaaggctgcaaagcaaaacagactgtgtttaactgctgcagggtctttttctagggtccctgaacgccctggtaaggctggtgaggtcctggtgcctatctgcctggaggcaaaggcctggacagcttgacttgtggggcaggattctctgcagcccattcccaagggagactgaccatcatgccctctctcgggagccctagccctgctccaactccatactccactccaagtgccccaccactccccaacccctctccaggcctgtcaagagggaggaaggggccccatggcagctcctgaccttgggtcctgaagtgacctcactggcctgccatgccagtaactgtgctgtactgagcactgaaccacattcagggaaatgcttattaaaccttgaagcaactgtgaattcattctggaggggcagtggagatcaggagtgacagatcacagggtgagggccacctccacacccaccccctctggagaaggcctggaagagctgagaccttgctttgagactcctcagcacccctccagttttgcctgagaaggggcagatgttcccggagatcagaagacgtctccccttctctgcctcacctggtcgccaatccatgctctctttcttttctctgtctactccttatcccttggtttagaggaacccaagatgtggcctttagcaaaactgacaatgtccaaacccactcatgactgcatgacggagccgagcatgtgtctttacacctcgctgttgtcacatctcagggaactgaccctcaggcacaccttgcagaaggaaggccctgccctgcccaacctctgtggtcacccatgcatcattccactggaacgtttcactgcaaacacaccttggagaagtggcatcagtcaacagagaggggcagggaaggagacaccaagctcacccttcgtcatggaccgaggttcccactctggcaaagcccctcacactgcaagggattgtagataacactgacttgtttgttttaaccaataactagcttcttataatgatttttttactaatgatacttacaagtttctagctctcacagacatatagaataagggtttttgcataataagcaggttgttatttaggttaacaatattaattcaggttttttagttggaaaaacaattcctgtaaccttctattttctataattgtagtaattgctctacagataatgtctatatattggccaaactggtgcatgacaagtactgtatttttttatacctaaataaagaaaaatctttagcctgggcaacaaaaaaa

SEQ ID NO: 1453 - DNA, 1890 bp; single-stranded, linear
  immediate source library: GENBANK
  immediate source clone: g601892
aaacagagagagatagagaaagagaaagacagaggtgtttcccttagctatggaaactctataagagagatccagcttgcctcctcttgagcagtcagcaacagggtcccgtccttgacacctcagcctctacaggactgagaagaagtaaaaccgtttgctggggctggcctgactcaccagctgccatgcagcagcccttcaattacccatatccccagatctactgggtggacagcagtgccagctctccctgggcccctccaggcacagttcttccctgtccaacctctgtgcccagaaggcctggtcaaaggaggccaccaccaccaccgccaccgccaccactaccacctccgccgccgccgccaccactgcctccactaccgctgccacccctgaagaagagagggaaccacagcacaggcctgtgtctccttgtgatgtttttcatggttctggttgccttggtaggattgggcctggggatgtttcagctcttccacctacagaaggagctggcagaactccgagagtctaccagccagatgcacacagcatcatctttggagaagcaaataggccaccccagtccaccccctgaaaaaaaggagctgaggaaagtggcccatttaacaggcaagtccaactcaaggtccatgcctctggaatgggaagacacctatggaattgtcctgctttctggagtgaagtataagaagggtggccttgtgatcaatgaaactgggctgtactttgtatattccaaagtatacttccggggtcaatcttgcaacaacctgcccctgagccacaaggtctacatgaggaactctaagtatccccaggatctggtgatgatggaggggaagatgatgagctactgcactactgggcagatgtgggcccgcagcagctacctgggggcagtgttcaatcttaccagtgctgatcatttatatgtcaacgtatctgagctctctctggtcaattttgaggaatctcagacgtttttcggcttatataagctctaagagaagcactttgggattctttccattatgattctttgttacaggcaccgagaatgttgtattcagtgagggtcttcttacatgcatttgaggtcaagtaagaagacatgaaccaagtggaccttgagaccacagggttcaaaatgtctgtagctcctcaactcacctaatgtttatgagccagacaaatggaggaatatgacggaagaacatagaactctgggctgccatgtgaagagggagaagcatgaaaaagcagctacccaggtgttctacactcatcttagtgcctgagagtatttaggcagattgaaaaggacaccttttaactcacctctcaaggtgggccttgctacctcaagggggactgtctttcagatacatggttgtgacctgaggatttaagggatggaaaaggaagactagaggcttgcataataagctaaagaggctgaaagaggccaatgccccactggcagcatcttcacttctaaatgcatatcctgagccatcggtgaaactaacagataagcaagagagatgttttggggactcatttcattcctaacacagcatgtgtatttccagtgccaattgtaggggtgtgtgtgtgtgtgtgtgtgtgtgtgtatgactaaagagagaatgtagatattgtgaagtacatattaggaaaatatgggttgcatttggtcaagattttgaatgcttcctgacaatcaactctaatagtgcttaaaaatcattgattgtcagctactaatgatgttttcctataatataataaatatttatgtagatgtgcatttttgtgaaatgaaaacatgtaataaaaagtatatgttaggatacaaat

SEQ ID NO: 1454 - DNA, 1036 bp; single-stranded, linear
  immediate source library: GENBANK
  immediate source clone: g601917
atgggcctagagctgtttcttgacctggtgtcccagcccagccgcgccgtctacatcttcgccaagaagaatggcatccccttagagctgcgcaccgtggatttggtcaaagggcagcacaagagcaaggagttcttgcagatcaacagcctggggaaactgccgacgctcaaggatggtgatttcatcttgaccgaaagctcggccatcctgatttacctgagctgtaagtaccagacgccggaccactggtatccatctgacctgcaggctcgtgcccgtgttcatgagtacctgggctggcatgccgactgcatccgtggcacctttggtatacccctgtgggtccaggtgttggggccactcattggggtccaggtgcccgaggagaaggtggaacgcaacaggactgccatggaccaggccctgcaatggctggaggacaagttcctgggggacaggcccttcctcgctggccagcaggtgacactggctgatctcatggccctggaggagctgatgcagccggtggctctcggctacgaactgtttgagggacggccacgactggcagcatggcgtggacgagtggaggctttcctgggtgctgagctatgccaggaggcccacagcatcatcttgagcatcctggaacaggcggccaagaaaaccctcccaacaccctcaccagaggcctatcaggctatgctgcttcgaatcgccaggatcccctgaagggtctgggatgggggccaggagattagcaacaaggattcattctgttacttacttgcccctttttatctttccctcttgccccagtcccttctctccagcttcatgtgaagctctgcacagacaagacactcagtgtccttggcagtgctgctactcctcaggtgcagcatacataaccagtaagagactaaatctgcaatatataaagagctcctacaaatcagtaacatgaagaacactcaaaaattggcaaatgtcatcagtgttttaaacagaataaagattccaaacactttga

SEQ ID NO: 1455 - DNA, 2439 bp; single-stranded, linear
  immediate source library: GENBANK
  immediate source clone: g602449
cagcacccagctccccgccaccgccatggtccccgacaccgcctgcgttcttctgctcaccctggctgccctcggcgcgtccggacagggccagagcccgttgggctcagacctgggcccgcagatgcttcgggaactgcaggaaaccaacgcggcgctgcaggacgtgcgggactggctgcggcagcaggtcagggagatcacgttcctgaaaaacacggtgatggagtgtgacgcgtgcgggatgcagcagtcagtacgcaccggcctacccagcgtgcggcccctgctccactgcgcgcccggcttctgcttccccggcgtggcctgcatccagacggagagcggcggccgctgcggcccctgccccgcgggcttcacgggcaacggctcgcactgcaccgacgtcaacgagtgcaacgcccacccctgcttcccccgagtccgctgtatcaacaccagcccggggttccgctgcgaggcttgcccgccggggtacagcggccccacccaccagggcgtggggctggctttcgccaaggccaacaagcaggtttgcacggacatcaacgagtgtgagaccgggcaacataactgcgtccccaactccgtgtgcatcaacacccggggctccttccagtgcggcccgtgccagcccggcttcgtgggcgaccaggcgtccggctgccagcgcggcgcacagcgcttctgccccgacggctcgcccagcgagtgccacgagcatgcagactgcgtcctagagcgcgatggctcgcggtcgtgcgtgtgtcgcgttggctgggccggcaacgggatcctctgtggtcgcgacactgacctagacggcttcccggacgagaagctgcgctgcccggagccgcagtgccgtaaggacaactgcgtgactgtgcccaactcagggcaggaggatgtggaccgcgatggcatcggagacgcctgcgatccggatgccgacggggacggggtccccaatgaaaaggacaactgcccgctggtgcggaacccagaccagcgcaacacggacgaggacaagtggggcgatgcgtgcgacaactgccggtcccagaagaacgacgaccaaaaggacacagaccaggacggccggggcgatgcgtgcgacgacgacatcgacggcgaccggatccgcaaccaggccgacaactgccctagggtacccaactcagaccagaaggacagtgatggcgatggtataggggatgcctgtgacaactgtccccagaagagcaacccggatcaggcggatgtggaccacgactttgtgggagatgcttgtgacagcgatcaagaccaggatggagacggacatcaggactctcgggacaactgtcccacggtgcctaacagtgcccaggaggactcagaccacgatggccagggtgatgcctgcgacgacgacgacgacaatgacggagtccctgacagtcgggacaactgccgcctggtgcctaaccccggccaggaggacgcggacagggacggcgtgggcgacgtgtgccaggacgactttgatgcagacaaggtggtagacaagatcgacgtgtgtccggagaacgctgaagtcacgctcaccgacttcagggccttccagacagtcgtgctggacccggagggtgacgcgcagattgaccccaactgggtggtgctcaaccagggaagggagatcgtgcagacaatgaacagcgacccaggcctggctgtgggttacactgccttcaatggcgtggacttcgagggcacgttccatgtgaacacggtcacggatgacgactatgcgggcttcatctttggctaccaggacagctccagcttctacgtggtcatgtggaagcagatggagcaaacgtattggcaggcgaaccccttccgtgctgtggccgagcctggcatccaactcaaggctgtgaagtcttccacaggccccggggaacagctgcggaacgctctgtggcatacaggagacacagagtcccaggtgcggctgctgtggaaggacccgcgaaacgtgggttggaaggacaagaagtcctatcgttggttcctgcagcaccggccccaagtgggctacatcagggtgcgattctatgagggccctgagctggtggccgacagcaacgtggtcttggacacaaccatgcggggtggccgcctgggggtcttctgcttctcccaggagaacatcatctgggccaacctgcgttaccgctgcaatgacaccatcccagaggactatgagacccatcagctgcggcaagcctagggaccagggtgaggacccgccggatgacagccaccctcaccgcggctggatgggggctctgcacccagcccaaggggtggccgtcctgagggggaagtgagaagggctcagagaggacaaaataaagtgtgtgtgcaggg

SEQ ID NO: 1456 - DNA, 2320 bp; single-stranded, linear
  immediate source library: GENBANK
  immediate source clone: g604478
gaattccggtgcagtgagaggcatgcttccttagaccaggcaacatttcatttgttgcatttccagtttccaataccaactcacctacaaagattttaccaaaaaccttaggaccaataaatgtgaatgttggaccccaaatgattataagcacaccacagagactaaccagttcaggaagtgttctgattgggagtccatatacccctgcaccagcaatggttactcagacacacatagcagaagctactggctgggtccctggtgatagaaaacgggctagaaaatttatagactctgatttttcagaaagtaaacgaagcaaaaaaggagataaaaatgggaaaggcttgagacacttttcaatgaaagtgtgtgagaaagttcaacgaaaaggtacaacatcgtacaatgaagtcgctgatgagctggtgtcagagttcaccaattcaaataaccatttggctgctgattcgcaggcttatgatcagaagaacattaggcgaagagtttatgatgctttaaatgtgctaatggcaatgaacataatttcaaaggaaaaaaaagaaatcaagtggattggcctgcctaccaattctgctcaggaatgtcagaatctggagatagagaagcagaggcggatagaacggataaagcagaagcgggcccagctgcaagaacttctcctacagcaaatcgctttcaaaaacctggtacagagaaatcgacaaaatgagcagcaaaaccagggcccgccggctctgaactctaccattcagctgccattcataatcatcaatacaagcagaaaaacagtcatagattgcagcatctccagtgacaagtttgagtatcttttcaattttgacaacacctttgagatccatgatgacatagaagtactaaagcggatgggaatgtcgtttggcctggagtcaggcaaatgctctctggaggatctgaaacttgcgaaatccctggtgccaaaggctttagaaggttatatcacagatatctccacaggaccttcttggttaaatcagggactacttctgaactctacccaatcagtttcaaatttagacctgaccactggtgccaccttaccccagtcaagtgtaaaccaagggttatgcttggatgcagaagtggccttagcaactgggcagttcctggccccaaacagtcaccagtccagcagtgcggcctctcactgctccgagtcccgaggcgagaccccctgttcgttcaatgatgaagatgaggaagatgatgaggaggattcctcctccccagaataaagacaagagaaagcctacgtttcaatatgtgatgctcatgtgtgtttgtagtgtgagctcttgtttttgaaatgattgcttcagtctttgcctttgtttgcactgtgtgttcagtgaaaactagagaaacacaataagcaaatcacatgaaggctgagatgattgagatgaaagttaacatagtgtgaatgaaagtctggccaacagagcagtagatgatataacacagaaagcatgctttctgaggagatagtggggataatccctgaagagttggcagtgtgagtccaactcatttatcttctgtgaggtgggatttttgtgttccctcaccacccatgtaatattcttagaattgagattgctacacggagcagtccttgacgatcgtgtttctgacgtttctcttccttgcctggactgcctttgacaaggcagaaatgaacatgaaaagtccccaggagaggggagctgtgtagtgagggatactgagggcagtcctgtggctgaggggcacagattgaactgctgaactagttggaggtctagatgaggtgctttacgcatcagctgccttagacagcttctagaaaggagcgagcgctacttcttaagtacttaagtgacatttagataatttatagtaaaactgaaattattattagccaatgcattggtgcatagaatttactagggctacttctggaagcccccaatagaatagcatttccatgtgcattaaatactttgccagcactgcctttgccagcatcctaaatctggagttttaccaagaaggaaactgtatctttaggttaatccaagctatgcatttcatatagctttttcatttaaaacaaggcaaagaaacaaattcctatgaccaaattgcttgcctacagttccctgcagtaattgtatgatctcacccagtgtgcaatttgtggaaatgaaccaaatgtcattacttttgtcttaaagaaaagtctatttcaagaatatggacagcagtggaaaaa

SEQ ID NO: 1457 - DNA, 863 bp; single-stranded, linear
  immediate source library: GENBANK
  immediate source clone: g609453
ggagtctccaactgggagagctgcagctgccgagaggaggagaacgctgaggtcggtcggaccaacggacgcgctgaccgctgccaactgcagctcgcgctgcctcctgctcgcgccgtgccactaaggtcactcccgcctccgagagcccagagccgagatggaaacggtccaggagctgatccccctggccaaggagatgatggcccagaagcgcaaggggaagatggtgaagctgtacgtgctgggcagcgtgctggccctcttcggcgtggtgctcggcctgatggagactgtgtgcagccccttcacggccgccagacgtctgcgggaccaggaggcagccgtggcggagctgcaggccgccctggagcgacaggctctccagaagcaagccctgcaggagaaaggcaagcagcaggacacggtcctcggcggccgggccctgtccaaccggcagcacgcctcctaggaactgtgggagaccagcggagtgggagggagacgcagtagacagagacagaccgagaaggaagggagagacagagggggcgcgcgcacaggagcctgactccgctgggagagtgcaggagcacgtgctgttttttatttggacttaacttcagagaaaccgctgacatctagaactgacctaccacaagcatccaccaaaggagtttgggattgagttttgctgctgtgcagcactgcattgtcatgacatttccaacactgtgtgaattatctaaatgcgtctaccattttgcactagggaggaaggataaatgctttttatgttattattattaattattacaatgaccaccattttgcattttgaaataaaaaactttttataccat

SEQ ID NO: 1458 - DNA, 737 bp; single-stranded, linear
  immediate source library: GENBANK
  immediate source clone: g623236
gaatctctttctctcccttcagaatcttatcttggctttggatcttagaagagaatcactaaccagagacgagactcagtgagtgagcaggtgttttggacaatggactggttgagcccatccctattataaaaatgtctcagagcaaccgggagctggtggttgactttctctcctacaagctttcccagaaaggatacagctggagtcagtttagtgatgtggaagagaacaggactgaggccccagaagggactgaatcggagatggagacccccagtgccatcaatggcaacccatcctggcacctggcagacagccccgcggtgaatggagccactggccacagcagcagtttggatgcccgggaggtgatccccatggcagcagtaaagcaagcgctgagggaggcaggcgacgagtttgaactgcggtaccggcgggcattcagtgacctgacatcccagctccacatcaccccagggacagcatatcagagctttgaacaggatacttttgtggaactctatgggaacaatgcagcagccgagagccgaaagggccaggaacgcttcaaccgctggttcctgacgggcatgactgtggccggcgtggttctgctgggctcactcttcagtcggaaatgaccagacactgaccatccactctaccctcccacccccttctctgctccaccacatcctccgtccagccgccattgccaccaggagaacccg

SEQ ID NO: 1459 - DNA, 5502 bp; single-stranded, linear
  immediate source library: GENBANK
  immediate source clone: g632544
ttccggctggacgttgccctgtgtacctcttcgactgcctgttcatctacgacgaaccccgggtattgaccccagacaacaatgccacttcatattgcatgaagacaaaaggtcctgtgctcacctgggacccttctggacgttgccctgtgttcctcttcgcctgcctgttcatctacgacgaaccccgggtattgaccccagacaacaatgccacttcatattggggacttcgtctgggattccaaggtgcattcattgcaaagttccttaaatattttctcactgcttcctactaaaggacggacagagcatttgttcttcagccacatactttccttccactggccagcattctcctctattagactagaactgtggataaacctcagaaaatggccacccagcagaaagcctctgacgagaggatctcccagtttgatcacaatttgctgccagagctgtctgctcttctgggcctagatgcagttcagttggcaaaggaactagaagaagaggagcagaaggagcgagcaaaaatgcagaaaggctacaactctcaaatgcgcagtgaagcaaaaaggttaaagacttttgtgacttatgagccgtacagctcatggataccacaggagatggcggccgctgggttttacttcactggggtaaaatctgggattcagtgcttctgctgtagcctaatcctctttggtgccggcctcacgagactccccatagaagaccacaagaggtttcatccagattgtgggttccttttgaacaaggatgttggtaacattgccaagtacgacataagggtgaagaatctgaagagcaggctgagaggaggtaaaatgaggtaccaagaagaggaggctagacttgcatccttcaggaactggccattttatgtccaagggatatccccttgtgtgctctcagaggctggctttgtctttacaggtaaacaggacacggtacagtgtttttcctgtggtggatgtttaggaaattgggaagaaggagatgatccttggaaggaacatgccaaatggttccccaaatgtgaatttcttcggagtaagaaatcctcagaggaaattacccagtatattcaaagctacaagggatttgttgacataacgggagaacattttgtgaattcctgggtccagagagaattacctatggcatcagcttattgcaatgacagcatctttgcttacgaagaactacggctggactcttttaaggactggccccgggaatcagctgtgggagttgcagcactggccaaagcaggtcttttctacacaggtataaaggacatcgtccagtgcttttcctgtggagggtgtttagagaaatggcaggaaggtgatgacccattagacgatcacaccagatgttttcccaattgtccatttctccaaaatatgaagtcctctgcggaagtgactccagaccttcagagccgtggtgaactttgtgaattactggaaaccacaagtgaaagcaatcttgaagattcaatagcagttggtcctatagtgccagaaatggcacagggtgaagcccagtggtttcaagaggcaaagaatctgaatgagcagctgagagcagcttataccagcgccagtttccgccacatgtctttgcttgatatctcttccgatctggccacggaccacttgctgggctgtgatctgtctattgcttcaaaacacatcagcaaacctgtgcaagaacctctggtgctgcctgaggtctttggcaacttgaactctgtcatgtgtgtggagggtgaagctggaagtggaaagacggtcctcctgaagaaaatagcttttctgtgggcatctggatgctgtcccctgttaaacaggttccagctggttttctacctctcccttagttccaccagaccagacgaggggctggccagtatcatctgtgaccagctcctagagaaagaaggatctgttactgaaatgtgcatgaggaacattatccagcagttaaagaatcaggtcttattccttttagatgactacaaagaaatatgttcaatccctcaagtcataggaaaactgattcaaaaaaaccacttatcccggacctgcctattgattgctgtccgtacaaacagggccagggacatccgccgatacctagagaccattctagagatccaagcatttcccttttataatactgtctgtatattacggaagctcttttcacataatatgactcgtctgcgaaagtttatggtttactttggaaagaaccaaagtttgcagaagatacagaaaactcctctctttgtggcggcgatctgtgctcattggtttcagtatccttttgacccatcctttgatgatgtggctgttttcaagtcctatatggaacgcctttccttaaggaacaaagcgacagctgaaattctcaaagcaactgtgtcctcctgtggtgagctggccttgaaagggtttttttcatgttgctttgagtttaatgatgatgatctcgcagaagcaggggttgatgaagatgaagatctaaccatgtgcttgatgagcaaatttacagcccagagactaagaccattctaccggtttttaagtcctgccttccaagaatttcttgcggggatgaggctgattgaactcctggattcagataggcaggaacatcaagatttgggactgtatcatttgaaacaaatcaactcacccatgatgactgtaagcgcctacaacaattttttgaactatgtctccagcctcccttcaacaaaagcagggcccaaaattgtgtctcatttgctccatttagtggataacaaagagtcattggagaatatatctgaaaatgatgactacttaaagcaccagccagaaatttcactgcagatgcagttacttaggggattgtggcaaatttgtccacaagcttacttttcaatggtttcagaacatttactggttcttgccctgaaaactgcttatcaaagcaacactgttgctgcgtgttctccatttgttttgcaattccttcaagggagaacactgactttgggtgcgcttaacttacagtactttttcgaccacccagaaagcttgtcattgttgaggagcatccacttctcaatacgaggaaataagacatcacccagagcacatttttcagttctggaaacatgttttgacaaatcacaggtgccaactatagatcaggactatgcttctgcctttgaacctatgaatgaatgggagcgaaatttagctgaaaaagaggataatgtaaagagctatatggatatgcagcgcagggcatcaccagaccttagtactggctattggaaactttctccaaagcagtacaagattccctgtctagaagtcgatgtgaatgatattgatgttgtaggccaggatatgcttgagattctaatgacagttttctcagcttcacagcgcatcgaactccatttaaaccacagcagaggctttatagaaagcatccgcccagctcttgagctgtctaaggcctctgtcaccaagtgctccataagcaagttggaactcagcgcagccgaacaggaactgcttctcaccctgccttccctggaatctcttgaagtctcagggacaatccagtcacaagaccaaatctttcctaatctggataagttcctgtgcctgaaagaactgtctgtggatctggagggcaatataaatgttttttcagtcattcctgaagaatttccaaacttccaccatatggagaaattattgatccaaatttcagctgagtatgatccttccaaactagttgccagtttgccaaattttatttctctgaagatattaaatcttgaaggccagcaatttcctgatgaggaaacatcagaaaaatttgcctacattttaggttctcttagtaacctggaagaattgatccttcctactggggatggaatttatcgagtggccaaactgatcatccagcagtgtcagcagcttcattgtctccgagtcctctcatttttcaagactttgaatgatgacagcgtggtggaaattggttaaaaatgtgtctgcaggcacacaggacgtgccttcacccccatctgactatgtggaaagagttgacagtcccatggcatactcttccaatggcaaagtgaatgacaagcggttttatccagagtcttcctataaatccacgccggttcctgaagtggttcaggagcttccattaacttcgcctgtggatgacttcaggcagcctcgttacagcagcggtggtaactttgagacaccttcaaaaagagcacctgcaaagggaagagcaggaaggtcaaagagaacagagcaagatcactatgagacagactacacaactggcggcgagtcctgtgatgagctggaggaggactggatcagggaatatccacctatcacttcagatcaacaaagacaactgtacaagaggaattttgacactggcctacaggaatacaagagcttacaatcagaacttgatgagatcaataaagaactctcccgtttggataaagaattggatgactatagagaagaaagtgaagagtacatggctgctgctgatgaatacaatagactgaagcaagtgaagggatctgcagattacaaaagtaagaagaatcattgcaagcagttaaacagcaaattgtcacacatcaagaagatggttggagactatgatagacagaaaacatagaaggctgatgccaagttgtttgagaaattaagtatctgacatctctgcaatcttctcagaaggcaaatgactttggaccataaccccggaagccaaacctctgtgagcatcacagttttggttgctttaatatcatcagtattgaagcattttataaatcgcttttgataatcaactgggctgaacactccaattaaggattttatgctttaaacattggttcttgtattaagaatgaaatactgtttgaggtttttaagccttaaaggaaggttctggtgtgaactaaactttcacaccccagacgatgtcttcatacctacatgtatttgtttgcataggtgatctcatttaatcctctcaaccacctttcagataactgttatttataatcacttttttccacataaggaaactgggttcctgcaatgaagtctctgaagtgaaactgcttgtttcctagcacacacttttggttaagtctgttttatgacttcattaataataaattccggcatcatacagctactcctccctaccgccacctccacagacaccactctcctggttccatctcctctgctgcttctagctccctgctctggcttcaaggtgcgcaggacctgcttccttggtgatcctctgtagtctcccacaccccacattatctacaaactgatgactcctaatttacatctccagctcagacctctccatcaatcccaacgcatacac

SEQ ID NO: 1460 - DNA, 1161 bp; single-stranded, linear
  immediate source library: GENBANK
  immediate source clone: g632973
gaattccgcagccatgaccccgcagcttctcctggcccttgtcctctgggccagctgcccgccctgcagtggaaggaaagggcccccagcagctctgacactgccccgggtgcaatgccgagcctctcggtacccgatcgccgtggattgctcctggaccctgccgcctgctccaaactccaccagccccgtgtccttcattgccacgtacaggctcggcatggctgcccggggccacagctggccctgcctgcagcagacgccaacgtccaccagctgcaccatcacggatgtccagctgttctccatggctccctacgtgctcaatgtcaccgccgtccacccctggggctccagcagcagcttcgtgcctttcataacagagcacatcatcaagcccgaccctccagaaggcgtgcgcctaagccccctcgctgagcgccacgtacaggtgcagtgggagcctcccgggtcctggcccttcccagagatcttctcactgaagtactggatccgttacaagcgtcagggagctgcgcgcttccaccgggtggggcccattgaagccacgtccttcatcctcagggctgtgcggccccgagccaggtactacgtccaagtggcggctcaggacctcacagactacggggaactgagtgactggagtctccccgccactgccacaatgagcctgggcaagtagcaagggcttcccgctgcctccagacagcacctgggtcctcgccaccctaagccccgggacacctgttggagggcggatgggatctgcctagcctgggctggagtccttgctttgctgctgctgagctgccgggcaacctcagatgaccgacttttccctttgagcctcagtttctctagctgagaaatggagatgtactactctctcctttacctttacctttaccacagtgcagggctgactgaactgtcactgtgagatattttttattgtttaattagaaaagaattgttgttgggctgggcgcagtggatcgcacctgtaatcccagtcactgggaagccgacgtgggtgggtagcttgaggccaggagctcgaaaccagtccgggccacacagcaagaccccatctctaaaaaattaatataaatataaaataaaaaaaaaaaaaaggaattc

SEQ ID NO: 1461 - DNA, 4756 bp; single-stranded, linear
  immediate source library: GENBANK
  immediate source clone: g633072
gcatgacgcgcggaggaggcagcgggagcagccgcgggagccgggaccgggtagccgcgcgctgggggtgggcgccgctcgctccgccccgcgaagcccctgcgcgctcagggacgcggcccccccgcggcagccgcgctaggctccggcgtgtggccgcggccgccgccgccgctgccatgtctccggggaagcccggggcgggcggagcggggacgaggcggaccggctggcggaggaggaggcgaaggagacggcaggaggcggcgacgacggtgcccgggctcgggcgcacggcggggcccgattcgcgcgtccggggcacgttccagggcgcgcggggcatgaagccggcggcgcgggaggcgcggctgcctccgcgctcgcccgggctgcgctgggcgctgccgctgctgctgctgctgctgcgcctgggccagatcctgtgcgcaggtggcacccctagtccaattcctgacccttcagtagcaactgttgccacaggggaaaatggcataacgcagatcagcagtacagcagaatcctttcataaacagaatggaactggaacacctcaggtggaaacaaacaccagtgaggatggtgaaagctctggagccaacgatagtttaagaacacctgaacaaggatctaatgggactgatggggcatctcaaaaaactcccagtagcactgggcccagtcctgtgtttgacattaaagctgtttccatcagtccaaccaatgtgatcttaacttggaaaagtaatgacacagctgcttctgagtacaagtatgtagtaaagcataagatggaaaatgagaagacaattactgttgtgcatcaaccatggtgtaacatcacaggcttacgtccagcgacttcatatgtattctccatcactccaggaataggcaatgagacttggggagatcccagagtcataaaagtcatcacagaaccgatcccagtttctgatctccgtgttgccctcacgggtgtgaggaaggctgctctctcctggagcaatggcaatggcactgcctcctgccgggttcttcttgaaagcattggaagccatgaggagttgactcaagactcaagacttcaggtcaatatctcgggcctgaagccaggggttcaatacaacatcaacccgtatcttctacaatcaaataagacaaagggagaccccttgggcacagaaggtggcttggatgccagcaatacagagagaagccgggcagggagccccaccgcccctgtgcatgatgagtccctcgtgggacctgtggacccatcctccggccagcagtcccgagacacggaagtcctgcttgtcgggttagagcctggcacccgatacaatgccaccgtttattcccaagcagcgaatggcacagaaggacagccccaggccatagagttcaggacaaatgctattcaggtttttgacgtcaccgctgtgaacatcagtgccacaagcctgaccctgatctggaaagtcagcgataacgagtcgtcatctaactatacctacaagatacatgtggcgggggagacagattcttccaatctcaacgtcagtgagcctcgcgctgtcatccccggactccgctccagcaccttctacaacatcacagtgtgtcctgtcctaggtgacatcgagggcacgccgggcttcctccaagtgcacaccccccctgttccagtttctgacttccgagtgacagtggtcagcacgacggagatcggcttagcatggagcagccatgatgcagaatcatttcagatgcatatcacacaggagggagctggcaattctcgggtagaaataaccaccaaccaaagtattatcattggtggcttgttccctggaaccaagtattgctttgaaatagttccaaaaggaccaaatgggactgaaggggcatctcggacagtttgcaatagaactgttcccagtgcagtgtttgacatccacgtggtctacgtcaccaccacggagatgtggctggactggaagagccctgacggtgcttccgagtatgtctaccatttagtcatagagtccaagcatggctctaaccacacaagcacgtatgacaaagcgattactctccagggcctgattccgggcaccttatataacatcaccatctctccagaagtggaccacgtctggggggaccccaactccactgcacagtacacacggcccagcaatgtgtccaacattgatgtaagtaccaacaccacagcagcaactttaagttggcagaactttgatgacgcctctcccacgtactcctactgccttcttattgagaaggctggaaattccagcaacgcaacacaagtagtcacggacattggaattactgacgctacagtcactgaattaatacctggctcatcatacacagtggagatctttgcacaagtaggggatgggatcaagtcactggaacctggccggaagtcattctgtacagatcctgcgtccatggcctccttcgactgcgaagtggtccccaaagagccagccctggttctcaaatggacctgccctcctggcgccaatgcaggctttgagctggaggtcagcagtggagcctggaacaatgcgacccacctggagagctgctcctctgagaatggcactgagtatagaacggaagtcacgtatttgaatttttctacctcgtacaacatcagcatcaccactgtgtcctgtggaaagatggcagcccccacccggaacacctgcactactggcatcacagatccccctcctccagatggatcccctaatattacatctgtcagtcacaattcagtaaaggtcaagttcagtggatttgaagccagccacggacccatcaaagcctatgctgtcattctcaccaccggggaagctggtcacccttctgcagatgtcctgaaatacacgtatgacgatttcaaaaagggagcctcagatacttatgtgacatacctcataagaacagaagaaaagggacgttctcagagcttgtctgaagttttgaaatatgaaattgacgttgggaatgagtcaaccacacttggttatttacaatgggaagctggaacctctgggctcctaccggcttgtgtggctggcttcaccaacattaccttccaccctcaaaacaaggggctcattgatggggctgagagctatgtgtccttcagtcgctactcagatgctgtttccttgccccaggatccaggtgtcatctgtggagcggtttttggctgtatctttggtgccctggttattgtgactgtgggaggcttcatcttctggagaaagaagaggaaagatgcaaagaataatgaagtgtccttttctcaaattaaacctaaaaaatctaagttaatcagagtggagaattttgaggcctacttcaagaagcagcaagctgactccaactgtgggttcgcagaggaatacgaagatctgaagcttgttggaattagtcaacctaaatatgcagcagaactggctgagaatagaggaaagaatcgctataataatgttctgccctatgatatttcccgtgtcaaactttcggtccagacccattcaacggatgactacatcaatgccaactacatgcctggctaccactccaagaaagattttattgccacacaaggacctttaccgaacactttgaaagatttttggcgtatggtttgggagaaaaatgtatatgccatcattatgttgactaaatgtgttgaacagggaagaaccaaatgtgaggagtattggccctccaagcaggctcaggactatggagacataactgtggcaatgacatcagaaattgttcttccggaatggaccatcagagatttcacagtgaaaaatatccagacaagtgagagtcaccctctgagacagttccatttcacctcctggccagaccacggtgttcccgacaccactgacctgctcatcaacttccggtacctcgttcgtgactacatgaagcagagtcctcccgaatcgccgattctggtgcattgcagtgctggggtcggaaggacgggcactttcattgccattgatcgtctcatctaccagatagagaatgagaacaccgtggatgtgtatgggattgtgtatgaccttcgaatgcataggcctttaatggtgcagacagaggaccagtatgttttcctcaatcagtgtgttttggatattgtcagatcccagaaagactcaaaagtagatcttatctaccagaacacaactgcaatgacaatctatgaaaaccttgcgcccgtgaccacatttggaaagaccaatggttacatcgcctaattccaaaggaataacctttctggagtgaaccagaccgtcgcacccacagcgaaggcacatgcccgatgtcgacatgttttatatgctaatatcttaattctttgttctgttttgtgagaactaattttgagggcatgaagctgcatatcatagatgacaaattggggctgtcgggggctgtggatgggtggggagcaaatcatctgcattcctgatgaccaatgggatgaggtcactttttttttttttcccccttcgaaggattgtggaaaaccaggaaaagggagctatgatttttttttccaaaacaatttcttttttaaaaaagactatttatatgattcacatgctaaagccaggattgtgttgggttgaatatattttaagtatcagaggtc

SEQ ID NO: 1462 - DNA, 738 bp; single-stranded, linear
  immediate source library: GENBANK
  immediate source clone: g639715
cccgcgacgcgtccgcaccctgcggccagagcggctttgagctcggctgcgtccgcgctaggcgctttttcccagaagcaatccaggcgcgcccgctggttcttgagcgccaggaaaagcccggagctaacgaccggccgctcggccactgcacggggccccaagccgcagaaggacgacggggagggtaatgaagctgagcccaggtctcctaggaaggagagagtgcgccggagcagcgtgggaaagaagggaagagtgtcgttaagtttacggccaacggtggattatccgggccgctgcgcgtctgggggctgcggaatgcgcgaggagaacaagggcatgcccagtgggggcggcagcgatgagggtctggccagcgccgcggcgcggggactagtggagaaggtgcgacagctcctggaagccggcgcggatcccaacggagtcaaccgtttcgggaggcgcgcgatccaggtcatgatgatgggcagcgcccgcgtggcggagctgctgctgctccacggcgcggagcccaactgcgcagaccctgccactctcacccgaccggtgcatgatgctgcccgggagggcttcctggacacgctggtggtgctgcaccgggccggggcgcggctggacgtgcgcgatgcctggggtcgtctgcccgtggacttggccgaggagcggggccaccgcgacgttgcagggtacctgcgcacagccacgggggactga

SEQ ID NO: 1463 - DNA, 7596 bp; single-stranded, linear
  immediate source library: GENBANK
  immediate source clone: g641957
gtggtcgcggctggggacgtgcgcccgcgccaccatcttcggctgaagaggcaattgcttttggatcgttccatttacaatggcgcagagaactggactcgaggatccagagaggtatctctttgtggacagggctgtcatctacaaccctgccactcaagctgattggacagctaaaaagctagtgtggattccatcagaacgccatggttttgaggcagctagtatcaaagaagaacggggagatgaagttatggtggagttggcagagaatggaaagaaagcaatggtcaacaaagatgatattcagaagatgaacccacctaagttttccaaggtggaggatatggcagaattgacatgcttgaatgaagcttccgttttacataatctgaaggatcgctactattcaggactaatctatacttattctggactcttctgtgtagttataaacccttacaagaatcttccaatttactctgagaatattattgaaatgtacagagggaagaagcgtcatgagatgcctccacacatctatgctatatctgaatctgcttacagatgcatgcttcaagatcgtgaggaccagtcaattctttgcacgggtgagtcaggtgctgggaagacagaaaatacaaagaaagttattcagtaccttgcccatgttgcttcttcacataaaggaagaaaggaccataatattcctggggaacttgaacggcagcttttgcaagcaaatccaattctcgaatcatttggaaatgcgaagactgtgaaaaatgataactcatctcgttttggcaaatttattcggatcaactttgatgtaactggctatatcgttggggccaacattgaaacataccttctggaaaagtctcgtgctgttcgtcaagcaaaagatgaacgtacttttcatatcttttaccagttgttatctggagcaggagaacacctaaagtctgatttgcttcttgaaggatttaataactacaggtttctctccaatggctatattcctattccgggacagcaagacaaagataatttccaggagaccatggaagcaatgcacataatgggcttctcccatgaagagattctgtcaatgcttaaagtagtatcttcagtgctacagtttggaaatatttctttcaaaaaggagagaaatactgatcaagcttccatgccagaaaatacagttgcgcagaagctctgccatcttcttgggatgaatgtgatggagtttactcgggccatcctgactccccggatcaaggtcggccgagactatgtgcaaaaagcccagaccaaagaacaggcagattttgcagtagaagcattggcaaaagctacctatgagcggctctttcgctggctcgttcatcgcatcaataaagctctggataggaccaaacgtcagggagcatctttcattggaatcctggatattgctggatttgaaatttttgagctgaactcctttgaacaactttgcatcaactacaccaatgagaagctgcagcagctgttcaaccacaccatgtttatcctagaacaagaggaataccagcgcgaaggcatcgagtggaacttcatcgatttcgggctggatctgcagccatgcatcgacctaatagagagacctgcgaaccctcctggtgtactggcccttttggatgaagaatgctggttccctaaagccacagataaaacctttgttgaaaaactggttcaagagcaaggttcccactccaagtttcagaaacctcgacaattaaaagacaaagctgatttttgcattatacattatgcagggaaggtggactataaggcagatgagtggctgatgaagaatatggaccccctgaatgacaacgtggccacccttttgcaccagtcatcagacagatttgtggcagagctttggaaagatgtggaccgtatcgtgggtctggatcaagtcactggtatgactgagacagcttttggctccgcatataaaaccaagaagggcatgtttcgtaccgttgggcaactctacaaagaatctctcaccaagctgatggcaactctccgaaacaccaaccctaactttgttcgttgtatcattccaaatcacgagaagagggctggaaaattggatccacacctagtcctagatcagcttcgctgtaatggtgtcctggaagggatccgaatctgtcgccagggcttccctaaccgaatagttttccaggaattcagacagagatatgagatcctaactccaaatgctattcctaaaggttttatggatggtaaacaggcctgtgaacgaatgatccgggctttagaattggacccaaacttgtacagaattggacagagcaagatatttttcagagctggagttctggcacacttagaggaagaaagagatttaaaaatcaccgatatcattatcttcttccaggccgtttgcagaggttgcctggccagaaaggcctttgccaagaagcagcagcaactaagtgccttaaaggtcttgcagcggaactgtgccgcgtacctgaaattacggcactggcagtggtggcgagtcttcacaaaggtgaagccgcttctacaagtgactcgccaggaggaagaacttcaggccaaagatgaagagctgttgaaggtgaaggagaagcagacaaaggtggaaggagagctggaggagatggagcggaagcaccagcagcttttagaagagaagaatatccttgcagaacaactacaagcagagactgagctctttgctgaagcagaagagatgagggcaagacttgctgctaaaaagcaggaattagaagagattctacatgacttggagtctagggttgaagaagaagaagaaagaaaccaaatcctccaaaatgaaaagaaaaaaatgcaagcacatattcaggacctggaagaacagctagacgaggaggaaggggctcggcaaaagctgcagctggaaaaggtgacagcagaggccaagatcaagaagatggaagaggagattctgcttctcgaggaccaaaattccaagttcatcaaagaaaagaaactcatggaagatcgcattgctgagtgttcctctcagctggctgaagaggaagaaaaggcgaaaaacttggccaaaatcaggaataagcaagaagtgatgatctcagatttagaagaacgcttaaagaaggaagaaaagactcgtcaggaactggaaaaggccaaaagaaaactcgacggggagacgaccgacctgcaggaccagatcgcagagctgcaggcgcagattgatgagctcaagctgcagctggccaagaaggaggaggagctgcagggcgcactggccagaggtgatgatgaaacactccataagaacaatgcccttaaagttgtgcgagagctacaagcccaaattgctgaacttcaggaagactttgaatccgagaaggcttcacggaacaaggccgaaaagcagaaaagggacttgagtgaggaactggaagctctgaaaacagagctggaggacacgctggacaccacggcagcccagcaggaactacgtacaaaacgtgaacaagaagtggcagagctgaagaaagctcttgaggaggaaactaagaaccatgaagctcaaatccaggacatgagacaaagacacgcaacagccctggaggagctctcagagcagctggaacaggccaagcggttcaaagcaaatctagagaagaacaagcagggcctggagacagataacaaggagctggcgtgtgaggtgaaggtcctgcagcaggtcaaggctgagtctgagcacaagaggaagaagctcgacgcgcaggtccaggagctccatgccaaggtctctgaaggcgacaggctcagggtggagctggcggagaaagcaagtaagctgcagaatgagctagataatgtctccacccttctggaagaagcagagaagaagggtattaaatttgctaaggatgcagctagtcttgagtctcaactacaggatacacaggagcttcttcaggaggagacacgccagaaactaaacctgagcagtcggatccggcagctggaagaggagaagaacagtcttcaggagcagcaggaggaggaggaggaggccaggaagaacctggagaagcaagtgctggccctgcagtcccagttggctgataccaagaagaaagtagatgacgacctgggaacaattgaaagtctggaagaagccaagaagaagcttctgaaggacgcggaggccctgagccagcgcctggaggagaaggcactggcgtatgacaaactggagaagaccaagaaccgcctgcagcaggagctggacgacctcacggtggacctggaccaccagcgccaggtcgcctccaacttggagaagaagcagaagaagtttgaccagctgttagcagaagagaagagcatctctgctcgctatgccgaagagcgggaccgggccgaagccgaggccagagagaaagaaaccaaagccctgtcactggcccgggccctcgaggaagccctggaggccaaggaggagtttgagaggcagaacaagcagctccgagcagacatggaagacctcatgagctccaaagatgatgtgggaaaaaacgttcacgaacttgaaaaatccaaacgggccctagagcagcaggtggaggaaatgaggacccagctggaggagctggaagacgaactccaggccacggaagatgccaagcttcgtctggaggtcaacatgcaggccatgaaggcgcagttcgagagagacctgcaaaccagggatgagcagaatgaagagaagaagcggctgctgatcaaacaggtgcgggagctcgaggcggagctggaggatgagaggaaacagcgggcgcttgctgtagcttcgaagaaaaagatggagatagacctgaaggacctcgaagcccaaatcgaggctgcgaacaaagctcgggatgaggtgattaagcagctccgcaagctccaggctcagatgaaggattaccaacgtgaattagaagaagctcgtgcatccagagatgagatttttgctcaatccaaagagagtgaaaagaaattgaagagtctggaagcagaaatccttcaattgcaggaggaacttgcctcatctgagcgagcccgccgacacgccgagcaggagagagatgagctggcggacgagatcaccaacagcgcctctggcaagtccgcgctgctggatgagaagcggcgtctggaagctcggatcgcacagctggaggaggagctggaagaggagcagagcaacatggagctgctcaacgaccgcttccgcaagaccactctacaggtggacacactgaacgccgagctagcagccgagcgcagcgccgcccagaagagtgacaatgcacgccagcaactggagcggcagaacaaggagctgaaggccaagctgcaggaactcgagggtgctgtcaagtctaagttcaaggccaccatctcagccctggaggccaagattgggcagctggaggagcagcttgagcaggaagccaaggaacgagcagccgccaacaaattagtccgtcgcactgagaagaagctgaaagaaatcttcatgcaggttgaggatgagcgtcgacacgcggaccagtataaagagcagatggagaaggccaacgctcggatgaagcagcttaaacgccagctggaggaagcagaagaagaagcgacgcgtgccaacgcatctcggcgtaaactccagcgggaactggatgatgccaccgaggccaacgagggcctgagccgcgaggtcagcaccctgaagaaccggctgaggcggggtggccccatcagcttctcttccagccgatctggccggcgccagctgcaccttgaaggagcttccctggagctctccgacgatgacacagaaagtaagaccagtgatgtcaacgagacgcagccaccccagtcagagtaaagttgcaggaagccagaggaggcaatacagtgggacagttaggaatgcacccggggcctcctgcagatttcggaaattggcaagctacgggattccttcctgaaagatcaactgtgtcttaaggctctccagcctatgcatactgtatcctgcttcagacttaggtacaattgctcccctttttatatacagacacacacaggacacatatattaaacagattgtttcatcattgcatctattttccatatagtcatcaagagaccattttataaaacatggtaagaccctttttaaaacaaactccaggcccttggttgcgggtcgctgggttattggggcagcgccgtggtcgtcactcagtcgctctgcatgctctctgtcatacagacaggtaacctagttctgtgttcacgtggcccccgactcctcagccacatcaagtctcctagaccactgtggactctaaactgcacttgtctctctcatttccttcaaataatgatcaatgctatttcagtgagcaaactgtgaaaggggctttggaaagagtaggaggggtgggctggatcggaagcaacacccatttggggttaccatgtccatcccccaaggggggccctccccctcgagtcgatggtgtcccgcatctactcatgtgaactggccttggcgagggctggtctgtgcatagaagggatagtggccacactgcagctgaggccccaggtggcagccatggatcatgtagacttccagatggtctcccgaaccgcctggctctgccggcgccctcctcacgtcaggagcaagcagccgtggacccctaagccgagctggtggaaggcccctccccgtcgccagccgggccctcatgctgaccttgcaaattcagccgctgctttgagcccaaaatgggaatattggttttgtgtccgaggcttgttccaagtttgtcaatgaggtttatggagcctccagaacagatgccatcttcctgaatgttgacatgccagtgggtgtgactccttcatttttccttctcccttccctttggacagtgttacagtgaacacttagcatcctgtttttggttggtagttaagcaaactgacattacggaaagtgccttagacactacagtactaagacaatgttgaatatatcattcgcctctataacaatttaatgtattcagttttgactgtgcttcatatcatgtacctctctagtcaaagtggtattacagacattcagtgacaatgaatcagtgttaattctaaatccttgatcctctgcaatgtgcttgaaaacacaaaccttttgggttaaaagctttaacatctattaggaagaatttgtcctgtgggtttggaatcttggattttccccctttatgaactgtactggctgttgaccaccagacacctgaccgcaaatatcttttcttgtattcccatatttctagacaatgatttttgtaagacaataaatttattcattatagatatttgcgcctgctctgtttacttgaagaaaaaagcacccgtggagaataaagagacctcaataaacaaaaaaaaaaa

SEQ ID NO: 1464 - DNA, 1128 bp; single-stranded, linear
  immediate source library: GENBANK
  immediate source clone: g665587
agtccgagtggagagagcgagctgagtggttgtgtggtcgcgtctcggaaaccggtagcgcttgcagcatggctgaccaactgactgaagagcagattgcagaattcaaagaagctttttcactatttgacaaagatggtgatggaactataacaacaaaggaattgggaactgtaatgagatctcttgggcagaatcccacagaagcagagttacaggacatgattaatgaagtagatgctgatggtaatggcacaattgacttccctgaatttctgacaatgatggcaagaaaaatgaaagacacagacagtgaagaagaaattagagaagcattccgtgtgtttgataaggatggcaatggctatattagtgctgcagaacttcgccatgtgatgacaaaccttggagagaagttaacagatgaagaagttgatgaaatgatcagggaagcagatattgatggtgatggtcaagtaaactatgaagagtttgtacaaatgatgacagcaaagtgaagaccttgtacagaatgtgttaaatttcttgtacaaaattgtttatttgccttttctttgtttgtaacttatctgtaaaaggtttctccctactgtcaaaaaaatatgcatgtatagtaattaggacttcattcctccatgttttcttcccttatcttactgtcattgtcctaaaaccttattttagaaaattgatcaagtaacatgttgcatgtggcttactctggatatatctaagcccttctgcacatctaaacttagatggagttggtcaaatgagggaacatctgggttatgccttttttaaagtagttttctttaggaactgtcagcatgttgttgttgaagtgtggagttgtaactctgcgtggactatggacagtcaacaatatgtacttaaaagttgcactattgcaaaacgggtgtattatccaggtactcgtacactatttttttgtactgctggtcctgtaccagaaacattttcttttattgttacttgctttttaaactttgtttagccacttaaaatctgcttatggcacaatttgcctcaaaatccattccaagttgtatatttgttttccaataaaaaaattacaatttaccc

SEQ ID NO: 1465 - DNA, 1500 bp; single-stranded, linear
  immediate source library: GENBANK
  immediate source clone: g673391
gaattctcaggtggggcctgagaatttgcattcctaacaagttcccaggtgatgctatgatactgatgatgcggacctcacgatgaaaccactattcctcccgcctgggcaacatggcagaatcccatctctactaaaaatacaaaaattcgctgggtgtggtggcataaggctgtggtcccagctactcaggaggctgaagtggaaggatcacctgagcctggagaggccgaggctgcagggagccatgattgcaccactgcactccagcctgggcaacagagtgagaccatgtctcaagaaaaaaaaaaaagaaagaaaccactgctctaggctaaatcccagccagagttggagccacccagctaaactggcctgttttccctcatttccttccccgaaggtatgcctgtgtcaagatgaggtcacggacgattacatcggagacaacaccacagtggactacactttgttcgagtctttgtgctccaagaaggacgtgcggaactttaaagcctggttcctccctatcatgtactccatcatttgtttcgtgggcctactgggcaatgggctggtcgtgttgacctatatctatttcaagaggctcaagaccatgaccgatacctacctgctcaacctggcggtggcagacatcctcttcctcctgacccttcccttctgggcctacagcgcggccaagtcctgggtcttcggtgtccacttttgcaagctcatctttgccatctacaagatgagcttcttcagtggcatgctcctacttctttgcatcagcattgaccgctacgtggccatcgtccaggctgtctcagctcaccgccaccgtgcccgcgtccttctcatcagcaagctgtcctgtgtgggcatctggatactagccacagtgctctccatcccagagctcctgtacagtgacctccagaggagcagcagtgagcaagcgatgcgatgctctctcatcacagagcatgtggaggcctttatcaccatccaggtggcccagatggtgatcggctttctggtccccctgctggccatgagcttctgttaccttgtcatcatccgcaccctgctccaggcacgcaactttgagcgcaacaaggccatcaaggtgatcatcgctgtggtcgtggtcttcatagtcttccagctgccctacaatggggtggtcctggcccagacggtggccaacttcaacatcaccagtagcacctgtgagctcagtaagcaactcaacatcgcctacgacgtcacctacagcctggcctgcgtccgctgctgcgtcaaccctttcttgtacgccttcatcggcgtcaagttccgcaacgatctcttcaagctcttcaaggacctgggctgcctcagccaggagcagctccggcagtggtcttcctgtcggcacatccggcgctcctccatgagtgtggaggccgagaccaccaccaccttctccccataggcgactcttctgcctggact

SEQ ID NO: 1466 - DNA, 2180 bp; single-stranded, linear
  immediate source library: GENBANK
  immediate source clone: g684921
ccatgaggccctgctgaatcctgctgaatagctactcccttctagctggagccacagctccctccaccgcggagcagggttacaacgtccctctcggtagaggtgcacgcagctcctcctggccaccctccccaccagttcccattgtctggcccccctcccccaacctcttctttccacactgccccatgagttcagggaatttccccagcatcccaaagcttgagtttcctgtcagtggggagagatgagtgtagataaaaggagtgcagaaggcacgaggaagccacagtgctccggatcctccaatcttcgctcctccaatctccgctcctccacccagttcaggaacccgcgaccgctcgcagcgctctcttgaccactatgagcctcctgtccagccgcgcggcccgtgtccccggtccttcgagctccttgtgcgcgctgttggtgctgctgctgctgctgacgcagccagggcccatcgccagcggtgagagcgcatggcgcgcgggacgcactcgcactcgggcacagaggtgcatcccagcctctgcggggtcgctgcgttccagggaactctcccagcaacctgccctataaagggtgtctctctttcttccccagctggtcctgccgctgctgtgttgagagagctgcgttgcgtttgtttacagaccacgcaaggagttcatcccaaaatgatcagtaatctgcaagtgttcgccataggcccacagtgctccaaggtggaagtggtgtaagttctgtgctgctgtgtccgctgtgaccttggcaagagagaaatcccgcagcctgggtcttcaaccttggtatctcatgagtgtatcttctttttctttccttcagagcctccctgaagaacgggaaggaaatttgtcttgatccagaagccccttttctaaagaaagtcatccagaaaattttggacgggtacttgtcactttgatctttgtggtttctaaatctgatctagggagaccatagacttcacaaggtctttattctctgtacgatttaagtaacacttttcatgtttagaattaaaaggttgttgaattgggaaagtttttctggattgtcctgggaaaatataccaatcttacatgtaattacttgagcaattacacacagcttgtcactaagttatgttttttgtttacccattgcttttattgatttttgtattctccttttttaccaaacatcataaacgctgagttttgacaagggtggagtagaaaggagtgtgaaaaatggttaaactaatataacatttttctcaacagtggaaacaaggaaaactgattaagagaaatgagcacgcatggaaaagtttcccagtcttcagcagagaagttttctggaggtctctgaacccagggaagacaagaaggaaagattttgttgttgtttgtttatttgtttttccagtagttagctttcttcctggattcctcactttgaagagtgtgaggaaaacctatgtttgccgcttaagctttcagctcagctaatgaagtgtttagcatagtacctctgctatttgctgttattttatctgctatgctattgaagttttggcaattgactatagtgtgagccaggaatcactggctgttaatctttcaaagtgtcttgaattgtaggtgactattatatttccaagaaatattccttaagatattaactgagaaggctgtggatttaatgtggaaatgatgtttcataagaattctgttgatggaaatacactgttatcttcacttttataagaaataggaaatattttaatgtttcttggggaatatgttagagaatttccttactcttgattgtgggatactatttaattatttcactttagaaagctgagtgtttcacaccttatctatgtagaatatatttccttattcagaatttctaaaagtttaagttctatgagggctaatatcttatcttcctataattttagacattctttatctttttagtatggcaaactgccatcatttacttttaaactttgattttatatgctatttattaagtattttattaggagtaccataattctggtagctaaatatatattttagatagatgaagaagctagaaaacaggcaaattcctgactgctagtttatatagaaatgtat

SEQ ID NO: 1467 - DNA, 2030 bp; single-stranded, linear
  immediate source library: GENBANK
  immediate source clone: g685173
tggctggcaatggccttgctgacctcgagccgggcccacgtggggacctttggagcacagcctacgatcctggtgcaaggccggtggatgcagaggccagtccatataccacccaggcctgcgaggagcgtggtccccacccatccagcccatatgtgcaagtgcccttgacagagaggctggtcatatccatggtgaccatttatgggccacaacaggtccccatctgcgcagtgaaccctgtgctgagcaccttgcagacgtgatcttgcttcgtcctgcagcactgtgcggggcaggaaaatccaagaggaagaaggatctacggatatcctgcatgtccaagccacccgcacccaaccccacacccccccggaacctggactcccggaccttcatcaccattggagacagaaactttgaggtggaggctgatgacttggtgaccatctcagaactgggccgtggagcctatggggtggtagagaaggtgcggcacgcccagagcggcaccatcatggccgtgaagcggatccgggccaccgtgaactcacaggagcagaagcggctgctcatggacctggacatcaacatgcgcacggtcgactgtttctacactgtcaccttctacggggcactattcagagagggagacgtgtggatctgcatggagctcatggacacatccttggacaagttctaccggaaggtgctggataaaaacatgacaattccagaggacatccttggggagattgctgtgtctatcgtgcgggccctggagcatctgcacagcaagctgtcggtgatccacagagatgtgaagccctccaatgtccttatcaacaaggagggccatgtgaagatgtgtgactttggcatcagtggctacttggtggactctgtggccaagacgatggatgccggctgcaagccctacatggcccctgagaggatcaacccagagctgaaccagaagggctacaatgtcaagtccgacgtctggagcctgggcatcaccatgattgagatggccatcctgcggttcccttacgagtcctgggggaccccgttccagcagctgaagcaggtggtggaggagccgtccccccagctcccagccgaccgtttctcccccgagtttgtggacttcactgctcagtgcctgaggaagaaccccgcagagcgtatgagctacctggagctgatggagcaccccttcttcaccttgcacaaaaccaagaagacggacattgctgccttcgtgaagaagatcctgggagaagactcataggggctgggcctcggaccccactccggccctccagagccccacagccccatctgcgggggcagtgctcacccacaccataagctactgccatcctggcccagggcatctgggaggaaccgagggggctgctcccacctggctctgtggcgagccatttgtcccaagtgccaaagaagcagaccattggggctcccagccaggcccttgtcggccccaccagtgcctctccctgctgctcctaggacccgtctccagctgctgagatcctggactgagggggcctggatgccccctgtggatgctgctgcccctgcacagcaggctgccagtgcctgggtggatgggccaccgccttgcccagcctggatgccatccaagttgtatatttttttaatctctcgactgaatggactttgcacactttggcccagggtggccacacctctatcccggctttggtgcggggtacacaagaggggatgagttgtgtgaataccccaagactcccatgagggagatgccatgagccgcccaaggccttcccctggcactggcaaacagggcctctgcggagcacactggctcacccagtcctgcccgccaccgttatcggtgtcattcacctttcgtgttttttttaatttatcctctgttgattttttcttttgctttatgggtttggcttgtttttcttgcatggtttggagctgatcgcttctcccccaccccctagggg

SEQ ID NO: 1468 - DNA, 1940 bp; single-stranded, linear
  immediate source library: GENBANK
  immediate source clone: g703117
aaagccagctacaggcgggcgactgcggggggcccctgaggcggcgggggccatggctggggtcgcgtgcttgggaaaagctgccgacgcagatgaatggtgcgacacgggcctgggctccctgggtccggacgcagcggcccccggaggacctgggttgggcgcggagttgggcccggggctgtcgtgggctcccctcgtcttcggctacgtcactgaggatggggacacggcactgcacttggctgtgattcatcagcatgaacccttcctggattttcttctaggcttctcggccggcactgagtacatggacctgcagaatgacctaggccagacagccctgcacctggcagccatcctgggggagacatccacggtggagaagctgtacgcagcaggcgccgggctgtgtgtggcggagcgtaggggccacacggcgctgcacctggcctgccgtgtgggggcacacgcctgtgcccgtgccctgcttcagccccgcccccggcgccccagggaagcccccgacacctacctcgctcagggccctgaccgtactcccgacaccaaccatacccctgtcgccttgtaccccgattccgacttggagaaggaagaagaggagagtgaggaggactggaagctgcagctggaggctgaaaactacgagggccacaccccactccacgtggccgttatccacaaagatgtggagatggtccggctgctccgagatgctggagctgaccttgacaaaccggagcccacgtgcggccggagcccccttcatttggcagtggaggcccaggcagccgatgtgctggagcttctcctgagggcaggcgcgaaccctgctgcccgcatgtacggtggccgcaccccactcggcagtgccatgctccggcccaaccccatcctcgcccgcctcctccgtgcacacggagcccctgagcccgagggcgaggatgagaaatccggcccctgcagcagcagtagcgacagcgacggcggagacgagggcgtgagtcaggaggagagacagggcagcccagctggggggtcaggatagaccggcagcaagaagcccaagaagataattaggcaccgaccttgggctgctgttagagaactcaggcggcacgccagtgacacggggcactagtcaggagagacctggacaggggtggtgggaagagcttgggcagaagtggctgaaaaactaaggcagtggcaaaggtagaactcaggcaggggtggagaaaagcgttggtcgcagtgattggtgaacacagcgggggtgggtggtagcgctgggggtgattttaggcagcaagaattggagaactcacactgcgaaaagaaaaccttgggtggcagtgatttgaacaccggcagtgctggggcaggacccgagccagcggtggggagagatatagtcagagaacccagcaatacagatccgtccttgggcaaggcgcggtgctggatgatgggtgcggaggaatttgggtaaaggcagagggaaggggtggaggagggccagctcagttgccgaaactctggagtggcggctggctagaaattggtctgtagaaatgaccttgaaaatggagttctggccaggtgcggtggctcacgcctgtaatcccagcactttgggaggccgaggcaggcagatcacgaggtcaggagttcgagaccagcctggccaacatggcaagaccctgtctctactaaaaatacaaaaattagctgggcgtggtggcgcatgcctataatcccagctacttgggaggctgaggtaggagaattgcttgaacctgggaggtggaggttgcagtgaacctagatcacgccactgcattccagcctgggcaacagagcgcatgatcagtcaaccgctcgagggatcttccataggatggtcaagacgcggacgt

SEQ ID NO: 1469 - DNA, 2135 bp; single-stranded, linear
  immediate source library: GENBANK
  immediate source clone: g736236
tcggcttatttgttttccctcctcttaggattgccccctgtgggtcactttctcagtcattttgagctcagcctaatcaaagactgaggttatgaagtcgatcctagatggccttgcagataccaccttccgcaccatcaccactgacctcctgtacgtgggctcaaatgacattcagtacgaagacatcaaaggtgacatggcatccaaattagggtacttcccacagaaattccctttaacttcctttaggggaagtcccttccaagagaagatgactgcgggagacaacccccagctagtcccagcagaccaggtgaacattacagaattttacaacaagtctctctcgtccttcaaggagaatgaggagaacatccagtgtggggagaacttcatggacatagagtgtttcatggtcctgaaccccagccagcagctggccattgcagtcctgtccctcacgctgggcaccttcacggtcctggagaacctcctggtgctgtgcgtcatcctccactcccgcagcctccgctgcaggccttcctaccacttcatcggcagcctggcggtggcagacctcctggggagtgtcatttttgtctacagcttcattgacttccacgtgttccaccgcaaagatagccgcaacgtgtttctgttcaaactgggtggggtcacggcctccttcactgcctccgtgggcagcctgttcctcacagccatcgacaggtacatatccattcacaggcccctggcctataagaggattgtcaccaggcccaaggccgtggtggcgttttgcctgatgtggaccatagccattgtgatcgccgtgctgcctctcctgggctggaactgcgagaaactgcaatctgtttgctcagacattttcccacacattgatgaaacctacctgatgttctggatcggggtcaccagcgtactgcttctgttcatcgtgtatgcgtacatgtatattctctggaaggctcacagccacgccgtccgcatgattcagcgtggcacccagaagagcatcatcatccacacgtctgaggatgggaaggtacaggtgacccggccagaccaagcccgcatggacattaggttagccaagaccctggtcctgatcctggtggtgttgatcatctgctggggccctctgcttgcaatcatggtgtatgatgtctttgggaagatgaacaagctcattaagacggtgtttgcattctgcagtatgctctgcctgctgaactccaccgtgaaccccatcatctatgctctgaggagtaaggacctgcgacacgctttccggagcatgtttccctcttgtgaaggcactgcgcagcctctggataacagcatgggggactcggactgcctgcacaaacacgcaaacaatgcagccagtgttcacagggccgcagaaagctgcatcaagagcacagtcaagattgccaaggtaaccatgtctgtgtccacagacacgtctgccgaggctctgtgagcctgatgcctccctggcagcacaggaaaagaatttttttttttaagctcaaaatctagaagagtctattgtctccttggttatatttttttaactttaccatgctcaatgaaaaggtgattgtcaccatgatcacttatcagtttgctaatgtttccatagtttaggtactcaaactccattctccaggggtttacagtgaagaaagcctgttgtttaagtgactgaacgatccttcaaagtctcaatgaaataggagggaaacctttggctacacaattggaagtctaagaacccatggaaaaatgccatcaaatgaataatgcctttgtaaccacaactttcactataatgtgaaatgtaactgtccgtagtatcagagatgtccatttttacaagttatagtactagagatattttgtaaaatgtattatgtcctgtgagatgtgtatcagtgtttatgtgctattaatatttgtttagttcagccaaactgaaaggtagacttttatgagaacaatggacaagcagtggatacgtgtcaatgtgtgcactttttttctatattattgcccatgatataactttagaaataaaccttaatatttcttcccaaaaaaaaaaa

SEQ ID NO: 1470 - DNA, 3714 bp; single-stranded, linear
  immediate source library: GENBANK
  immediate source clone: g736682
gcggggcgcagagccggcccggctgccggacggtgcggccccaccaggtgaacggccatggcgggctggatccaggcccagcagctgcagggagacgcgctgcgccagatgcaggtgctgtacggccagcacttccccatcgaggtccggcactacttggcccagtggattgagagccagccatgggatgccattgacttggacaatccccaggacagagcccaagccacccagctcctggagggcctggtgcaggagctgcagaagaaggcggagcaccaggtgggggaagatgggtttttactgaagatcaagctggggcactacgccacgcagctccagaaaacatatgaccgctgccccctggagctggtccgctgcatccggcacattctgtacaatgaacagaggctggtccgagaagccaacaattgcagctctccggctgggatcctggttgacgccatgtcccagaagcaccttcagatcaaccagacatttgaggagctgcgactggtcacgcaggacacagagaatgagctgaagaaactgcagcagactcaggagtacttcatcatccagtaccaggagagcctgaggatccaagctcagtttgcccagctggcccagctgagcccccaggagcgtctgagccgggagacggccctccagcagaagcaggtgtctctggaggcctggttgcagcgtgaggcacagacactgcagcagtaccgcgtggagctggccgagaagcaccagaagaccctgcagctgctgcggaagcagcagaccatcatcctggatgacgagctgatccagtggaagcggcggcagcagctggccgggaacggcgggccccccgagggcagcctggacgtgctacagtcctggtgtgagaagttggccgagatcatctggcagaaccggcagcagatccgcagggctgagcacctctgccagcagctgcccatccccggcccagtggaggagatgctggccgaggtcaacgccaccatcacggacattatctcagccctggtgaccagcacattcatcattgagaagcagcctcctcaggtcctgaagacccagaccaagtttgcagccaccgtacgcctgctggtgggcgggaagctgaacgtgcacatgaatcccccccaggtgaaggccaccatcatcagtgagcagcaggccaagtctctgcttaaaaatgagaacacccgcaacgagtgcagtggtgagatcctgaacaactgctgcgtgatggagtaccaccaagccacgggcaccctcagtgcccacttcaggaacatgtcactgaagaggatcaagcgtgctgaccggcggggtgcagagtccgtgacagaggagaagttcacagtcctgtttgagtctcagttcagtgttggcagcaatgagcttgtgttccaggtgaagactctgtccctacctgtggttgtcatcgtccacggcagccaggaccacaatgccacggctactgtgctgtgggacaatgcctttgctgagccgggcagggtgccatttgccgtgcctgacaaagtgctgtggccgcagctgtgtgaggcgctcaacatgaaattcaaggccgaagtgcagagcaaccggggcctgaccaaggagaacctcgtgttcctggcgcagaaactgttcaacaacagcagcagccacctggaggactacagtggcctgtccgtgtcctggtcccagttcaacagggagaacttgccgggctggaactacaccttctggcagtggtttgacggggtgatggaggtgttgaagaagcaccacaagccccactggaatgatggggccatcctaggttttgtgaataagcaacaggcccacgacctgctcatcaacaagcccgacgggaccttcttgttgcgctttagtgactcagaaatcgggggcatcaccatcgcctggaagtttgactccccggaacgcaacctgtggaacctgaaaccattcaccacgcgggatttctccatcaggtccctggctgaccggctgggggacctgagctatctcatctatgtgtttcctgaccgccccaaggatgaggtcttctccaagtactacactcctgtgctggctaaagctgttgatggatatgtgaaaccacagatcaagcaagtggtccctgagtttgtgaatgcatctgcagatgctgggggcagcagcgccacgtacatggaccaggccccctccccagctgtgtgcccccaggctccctataacatgtacccacagaaccctgaccatgtactcgatcaggatggagaattcgacctggatgagaccatggatgtggccaggcacgtggaggaactcttacgccgaccaatggacagtcttgactcccgcctctcgccccctgccggtcttttcacctctgccagaggctccctctcatgaatgtttgaatcccacgcttctctttggaaacaatatgcaatgtgaagcggtcgtgttgtgagtttagtaaggttgtgtacactgacacctttgcaggcatgcatgtgcttgtgtgtgtgtgtgtgtgtgtgtccttgtgcatgagctacgcctgcctcccctgtgcagtcctgggatgtggctgcagcagcggtggcctcttttcagatcatggcatccaagagtgcgccgagtctgtctctgtcatggtagagaccgagcctctgtcactgcaggcactcaatgcagccagacctattcctcctgggcccctcatctgctcagcagctatttgaatgagatgattcagaaggggaggggagacaggtaacgtctgtaagctgaagtttcactccggagtgagaagctttgccctcctaagagagagagacagagagacagagagagagaaagagagagtgtgtgggtctatgtaaatgcatctgtcctcatgtgttgatgtaaccgattcatctctcagaagggaggctgggggttcattttcgagtagtattttatactttagtgaacgtggactccagactctctgtgaaccctatgagagcgcgtctgggcccggccatgtccttagcacaggggggccgccggtttgagtgagggtttctgagctgctctgaattagtccttgcttggctgcttggccttgggcttcattcaagtctatgatgctgttgcccacgtttcccgggatatatattctctcccctccgttgggccccagccttctttgcttgcctctctgtttgtaaccttgtcgacaaagaggtagaaaagattgggtctaggatatggtgggtggacaggggccccgggacttggagggttggtcctcttgcctcctggaaaaaacaaaaacaaaaaactgcagtgaaagacaagctgcaaatcagccatgtgctgcgtgcctgtggaatctggagtgaggggtaaaagctgatctggtttgactccgctggaggtggggcctggagcaggccttgcgctgttgcgtaactggctgtgttctggtgaggccttgctcccaaccccacacgctcctccctctgaggctgtaggactcgcagtcaggggcagctgaccatggaagattgagagcccaaggtttaaacttctctgaagggaggtggggatgagaagaggggtttttttgtactttgtacaaagaccacacatttgtgtaaacagtgttttggaataaaatatttttttcat

SEQ ID NO: 1471 - DNA, 1813 bp; single-stranded, linear
  immediate source library: GENBANK
  immediate source clone: g746414
aattcgcgtactagccggacttggattttctggaaagatttcagttgaggaacgggaacaaagattatgatagctttccgaccaccaccaacttcaatttccttagctgccgtaatatcagctccctgagctgagccttgaggtccgagttcatctccagctccagaagagcctgggagatgccggactcgaactcgtccgcttctcgccattgggcttcacgatcttggcgctcgaactgaacatggcttctcctttgagaagagcttggctattgtggatgaggagctggaggggacactggcgcagggagagctgaatgagatgaggacccgcctctatctcaacctgggcctcacctttgagagcctgcagcagacagccctgtgcaacgattacttcaggaagagcatcttccttgcggacgagaaccacctttacgaggacctattccgcgcccgctacaacctgggcaccatccactggcgcgcgggccagcactcccaggctatgcgctgcttggagggtgcccgggagtgtgcgcacaccatgagcgaagcggttcatggagagcgagtgctgcgtggttattgcacaggtcctccaagacctgggagactttttggctgccaagcgagccctgaagaagcgctacaggctgggctcccagaagcctgtgcagagggcagccatctgtcagaacctccagcatgtgctgcagtggtccggctgcagcaacagctggaagaggctgagggcagagaccctcagggtgccatggtcatctgtgagcagctaggggacctcttctccaaggcaggagactttcccagggcagctgaggcttaccagaagcagctgcgttttgctgagctgctggacagaccgggtgctgagcgggccatcatccacgtgtccctggccaccacactgggagacatgaaggaccaccatggggccgtgcgccactatgaggaggaactgaggctgcgcagcggcaacgtgctggaggaggccaagacctggctgaacattgcactgtcccgcgaggaggcgcgatgcctacgagctgctggccccgtgcttccagaaagcgctcagctgtgcccagcaggcccagcgtccccagctgcagaggcaggtcttgcagcatctccataccgtgcagctgagggctgcaggccccaggaggcccctgagaccgaaaccagactgcgggagctcagtgtagctgaagatgaagatgaggaggaggaggcggaggaggcggcacacagcggagagcgaacgcctggaggccggcgaggtggagctctcagagagcgaggacgacaccgatggcctgaccccgcagctggaggaggacgaggagcttcagggccacctggggccgccaaggggagcaagtggaaccggcgaaacgacatgggggagaccctgctgcaccgagcctgcatcgagggccagctgcgccgcgtccaggaccttgtgaggcagggccacccccttaaccctcgggactactgtggctggacacctctgcacgaggcctgcaactacgggcatctagaaattgtccgcttcctgctggaccacggggccgcagtggacgacccaggtggccagggctgcgaaggcatcacccccctccacgatgccctcaactgtggccacttcgaggtggctgagctgctgcttgaacggggggcgtccgtcaccctccgcactcgaaaggcctcagcgcgctggagacgctgcagcagtgggtgaagctgtaccgcggagacctggactggagacgcgggcggaattc

SEQ ID NO: 1472 - DNA, 1672 bp; single-stranded, linear
  immediate source library: GENBANK
  immediate source clone: g755465
aaaaaaattaaaaaaaaaaaaaaaaacagaaaaaaaaacatagtacatgccaagatattattatgacaattacaaatacaaataaattatgatctttgacctcagcatatttattaactaaaagggaagataaaacaggcacataactataacaggggcaccagtcatgggcgccgcagccgctcaggcgcctctcgggctgcctgcggcctccgctcgccttctgctgctagcgacgtcggtgcttctgctcttcgccttctctctgcccgggagccgcgcgtccaaccagcccccgggtggtggcggcggcacgggcggggactgtcccggcggcaaaggcaagagcatcaactgctcagaattaaatgtgagggagtctgacgtaagagtttgtgatgagtcatcatgtaaatatggaggagtctgtaaagaagatggagatggtttgaaatgtgcatgccaatttcagtgccatacaaattatattcctgtctgtggatcaaatggggacacttatcaaaatgaatgctttctcagaagggctgcttgtaagcaccagaaagagataacagtaatagcaagaggaccatgctactctgataatggatctggatctggagaaggagaagaggaagggtcaggggcagaagttcacagaaaacactccaagtgtggaccctgcaaatataaagctgagtgtgatgaagatgcagaaaatgttgggtgtgtatgtaatatagattgcagtggatacagttttaatcctgtgtgtgcttctgatgggagttcctataacaatccctgttttgttcgagaagcatcttgtataaagcaagaacaaattgatataaggcatcttggtcattgcacagatacagatgacactagtttgttgggaaagaaagatgatggactacaatatcgaccagatgtgaaagatgctagtgatcaaagagaagatgtttatattggaaaccacatgccttgccctgaaaacctcaatggttactgcatccatggaaaatgtgaattcatctatctactcagaagggcttcttgtagatgtgaatctggctacactggacagcactgtgaaaagacagactttagtattctctatgtagtgccaagtaggcaaaagctcactcatgttcttattgcagcaattattggagctgtacagattgccatcatagtagcaattgtaatgtgcataacaagaaaatgccccaaaaacaatagaggacgtcgacagaagcaaaacctaggtcattttacttcagatacgtcatccagaatggtttaaactgatgacttttatatgtacactgaccatgtgtatgtacatttattatgtctttttttaaagaatggaaatatttatttcagaaggccttatttttggacattttatagtgtagtactgttggctcgatatttgaatattcagctacgacagttttggactgtttagtagtctttgttttatgtttttaaatacagaaattgcttcacaaatttgtaccacatggtaattctaagacttgttctttacccatggaatgtaatatttttgcaaagatggactacttcacaaatggttataaagtcatatccacttcttccacaatgaccacagcaaatgacccaagcatgaactaaagaagag

SEQ ID NO: 1473 - DNA, 6263 bp; single-stranded, linear
  immediate source library: GENBANK
  immediate source clone: g755652
gctaactcaagggagacgtctggtgaacacccgtgggatctaaagaacaagctctgaaagtgttccagctgaaatttcagatcggacagactcgctgcggctccggaggcagtgattccaagctgctcgcgcacgctgctgccaagctgcaggatggtgcacgtagccaggctgctgctgctgctcctcactttcttcctccgcacggatgctgagacacctccaaggtttacacgaacacccgttgatcagacaggggtctctggcggagttgcctctttcatctgccaagctacgggagacccaagacctaaaattgtctggaacaaaaaaggaaagaaagtcagcaatcagagatttgaggtaatagagtttgacgatgggtctggatcagttctcagaatacaacccttacggactccgagggatgaggccatttatgaatgtgtggcctcaaataatgtgggagaaataagtgtatccaccagactcacagttttgcgggaagatcaaattcccaggggcttccctaccattgacatgggcccacagttgaaggtggttgagcgtactcgcacggccaccatgctttgtgcagccagtggtaatccggatccagaaatcacttggtttaaagatttcttacctgtggacacaagcaacaacaatggtcgtattaagcagttacgatcagaatctattggtggtacaccaataagaggagcccttcagattgagcagagtgaagagtctgaccaaggaaaatatgagtgtgttgccaccaacagcgcgggcactcgctattccgctcctgccaatttatatgtcagagagctgcgagaagttcgccgtgtcccaccaagattctctatcccacccactaatcatgaaatcatgccaggcggaagcgttaatatcacctgtgtggccgtggggtcaccaatgccttatgtaaagtggatgttgggggcagaagatctgacacctgaagatgatatgccaataggaagaaatgtgctagaactgaatgatgtaagacagtcagcaaattacacctgtgttgctatgtcaacactgggtgtcattgaagcaatagcacagatcactgtcaaagccttacccaaacctccaggaactcctgtagtgaccgagagcacagctacaagcatcacactgacgtgggactctgggaaccctgagcctgtttcttattacataattcagcataaacctaaaaactctgaggaactttacaaagaaattgatggggtggcgaccacacgctacagtgtcgctggactaagtccctactcggattatgaattcagggttgttgctgtcaataacattgggcgggggcctcccagcgaacctgtgctaacacaaacctcagagcaagcaccatccagtgccccgagggatgtccaggcacgaatgttgagttcgaccaccattttggtacagtggaaggaacctgaagagccaaatggacagatccaaggatatagagtttattatacaatggatcccactcaacatgtcaacaactggatgaaacacaatgtagctgacagccaaatcactactattggcaacttagtgccccagaaaacatattctgtcaaagtcctggcttttacctcaattggagatggtcccctttcaagtgacatacaagtcatcactcagacaggagtaccagggcagccactaaacttcaaagcagaacctgagtctgaaacaagtattttgctctcttggacacctccacgttcagataccattgccaactatgaactggtctacaaagatggggagcatggagaggagcaacgaattaccattgagccagggacatcatataggctgcaaggactgaaaccaaacagcttatactatttccgtctggctgcacgctcccctcaaggcctgggtgcttctactgcagaaatatcagctagaaccatgcagtcaaagccgtcagctcctcctcaagacattagttgcaccagcccaagttccactagtattttggtaagttggcaacctccaccagtggaaaaacagaatggcattatcactgaatactccatcaagtacactgcagtggatggggaagatgacaagcctcacgagattttgggaattccttcggacactaccaaataccttttggaacagctggaaaaatggactgaataccggatcactgtgacagcccatacagatgtcggccctggccctgagagcttgtccgtgttgattcgaaccaatgaagatgttcctagtggtcctcctcgcaaagtcgaggtagaggctgtcaactcaacatctgttaaagtctcatggcgctcacccgtgcccaataaacagcatggccagataagaggatatcaggtgcattatgtgaggatggaaaatggtgagcccaagggccagcccatgctgaaagatgtcatgctggctgatgcacagtgggaatttgatgatactactgaacatgacatgatcatttctgggctccagcctgaaacttcctactccctcaccgtcacagcctacacaaccaaaggagatggtgctcgcagcaagcccaaactggtgtccaccactggggcagttccagggaaacctcggcttgtgattaaccacactcagatgaatactgctcttattcagtggcaccctccggtggacacatttggacctcttcagggctaccgtctaaaatttggccgcaaggatatggagccacttactactcttgagttctctgaaaaagaagatcactttacagctacagacatccacaagggagcatcatacgtcttcaggctctcagccagaaacaaagtgggctttggggaggagatggtgaaggagatttccattccagaagaagtaccaactggattccctcaaaaccttcactcagaaggcaccacttcaacctccgtccagttatcttggcaaccacctgtcctggcagagagaaatggcattatcaccaagtatacccttctttatagggatatcaacatcccccttctcccgatggagcagcttattgttccagctgacaccactatgacactcactggcttaaaaccagataccacatacgatgtaaaagtacgtgctcatacgagcaaagggcccgggccatatagtcccagtgtccagttcaggacactgcctgtggatcaagtgtttgcaaaaaattttcatgtcaaagcagtaatgaagacttccgtgttgctgtcttgggagattccagagaattataactccgccatgcctttcaaaattctttatgatgatgggaaaatggtagaagaagtggatggccgagccacacagaagttaattgtcaacctgaagcctgagaaatcatattcatttgtgctgacaaatcgtggaaacagtgctggtgggctgcagcacagggtcacggcaaagactgcaccagatgtattacgtaccaagcctgccttcattgggaagaccaacttggatggcatgattactgtgcaactgcctgaagtacctgcaaatgagaatataaaaggttactacataataattgtgcctttgaagaaatctcgcgggaaatttatcaagccatgggagagtccagatgaaatggaattagatgagctgcttaaggagatatctaggaagcgcagaagcatccgttatgggagagaagttgaattaaagccatatattgccgctcactttgatgtccttcccactgagttcaccctgggggatgacaagcattatggtggatttacaaacaagcaactccaaagtggtcaagaatatgtcttctttgtgttagcagtaatggaacatgcagagtctaagatgtatgcaaccagcccttactccgaccccgtggtgtcaatggatctggatccgcagccaatcacggatgaagaagaaggcttgatctgggttgtaggtcctgtccttgcagtggtctttatcatctgcattgtcattgctattcttctttataaaaggaagagggcagagtccgactctagaaaaagcagcataccgaacaataaggagatcccttcacaccacccaacagaccctgtagaactgaggcgccttaactttcaaacaccgggtatggctagccatcctccaatacccatcttggaacttgcagaccacattgaaagattgaaagcaaatgacaacttgaagttttcccaggaatatgagtcaattgaccctggccagcagttcacttgggaacattcaaacttggaagtaaacaaaccaaagaatagatacgcgaatgtaatcgcatatgatcattcccgggttctcctatcagctatagaagggatcccaggaagtgactatgtgaatgccaactacatagatgggtataggaagcaaaatgcctatattgcaacacagggatctctccccgaaacatttggggacttttggagaatgatatgggaacaacggagtgccacagttgtcatgatgacaaaactagaagaaagatcaagggtgaagtgtgaccagtattggcctagcagaggcacagaaacccacggactcgttcaagtaacgctgcttgatactgtggagctggccacatattgtgttcgaacatttgcactttacaagaatggttcaagtgagaagagagaagtgagacaattccagttcaccgcctggcctgatcatggtgttccagaacaccctacaccttttctagctttcttacgtagagtcaaaacctgtaaccctcccgatgctggtccgatggttgtgcactgcagtgcgggagttggccggactggttgcttcatcgtcatagatgccatgttagaaagaataaagcatgaaaaaactgtagatatttatggccatgtaactttaatgagagcccagaggaactatatggttcaaacagaagaccaatacatctttatccatgatgcactgttagaagcagtgacttgtggaaataccgaagtgccagctagaaacttgtatgcctacattcagaagctgacacaaatagaaacgggagagaatgtcacaggaatggagctcgaatttaagcgtctagccagctcaaaagctcacacctcaaggtttatcagtgccaatcttccatgtaataaattcaaaaatcgccttgttaatattatgccatatgaatccacaagggtatgcctgcagcctatccgtggagtagaaggatctgattacatcaatgccagttttattgatggatacagacaacagaaagcctacatcgctacccaggggcccttggcagagaccactgaagacttctggcggatgctctgggaacacaattccaccatagttgtgatgctcaccaagctgcgtgaaatgggcagagagaaatgtcaccaatactggccagcagaacggtctgcaagataccagtactttgttgtagatcccatggctgagtacaacatgccacagtatatcctaagggaattcaaggtcacagatgccagggacggccagtcccgaacagtaaggcagttccagttcactgactggccagagcaaggagtgccaaagtccggagaaggatttattgacttcatcggccaagtccataaaacaaaagaacagtttggccaagatggacccatttcagtccattgcagcgcgggcgttggaagaactggagtcttcataacgctaagcattgttttggaaagaatgagatatgaaggagttgtagatatcttccagactgtcaaaatgttaagaacacaacgaccagctatggtacagacagaggatcaatatcagttttcctatcgtgccgcactagagtacctgggcagctttgaccactatgcaacgtagaaacccctgacccattctggatttttactacaggcccttcaatatccatggagtctcttctgagccatacagggcacttgagaagtccttcttaacttctagctaacaactacttagtgggactattacacacaaaacaaattaaaaacaaattattccaggtggaccaagaattctttgacatcgccccttcccaccatactgctcataataacattttaggggccaaggggagggaatgtttaaaaagaaagtccttgatttagttttttagtattgtaaagatactgctgacctgtgcttcatttctaactgtgtaaacttttttttaacaaaatgtatcattcgataaagtgaattttaaaaaagtt

SEQ ID NO: 1474 - DNA, 1949 bp; single-stranded, linear
  immediate source library: GENBANK
  immediate source clone: g758797
tgagccacccgggttgggccaggatcccggcaggctgatcccgtcctccactgagacctgaaaaatggcttcggggcaaggcccaggtcctcccaggcaggagtgcggagagcctgccctgccctctgcttctgaggagcaggtagcccaggacacagaggaggttttccgcagctacgttttttaccgccatcagcaggaacaggaggctgaaggggtggctgcccctgccgacccagagatggtcaccttacctctgcaacctagcagcaccatggggcaggtgggacggcagctcgccatcatcggggacgacatcaaccgacgctatgactcagagttccagaccatgttgcagcacctgcagcccacggcagagaatgcctatgagtacttcaccaagattgccaccagcctgtttgagagtggcatcaattggggccgtgtggtggctcttctgggcttcggctaccgtctggccctacacgtctaccagcatggcctgactggcttcctaggccaggtgacccgcttcgtggtcgacttcatgctgcatcactgcattgcccggtggattgcacagaggggtggctgggtggcagccctgaacttgggcaatggtcccatcctgaacgtgctggtggttctgggtgtggttctgttgggccagtttgtggtacgaagattcttcaaatcatgactcccaagggtgccctttgggtcccggttcagacccctgcctggacttaagcgaagtctttgccttctctgttcccttgcaggggtcccccctcaagagtacagaagctttagcaagtgtgcactccagcttcggagggcccctgcgtgggggccagtcaggctgcagaggcacctcaacattgcatggtgctagtgggccctctctctgggcccaggggctgtggccgtctcctccctcagctctctgggacctccttagccctgtctgctaggcgctggggagactgataacttggggaggcaagagactgggagccacttctccccagaaagtgtttaacggttttagctttttataatacccttgtgagagcccattcccaccattctacctgaggccaggacgtctggggtgtggggattggtgggtctatgttccccaggattcagctattctggaagatcagcaccctaagagatgggactaggacctgagcctggtcctggccgtccctaagcatgtgtcccaggagcaggacctactaggagaggggggccaaggtcctgctcaactctacccctgctcccattcctccctccggccatactgcctttgcagttggactctcagggattctgggcttggggtgtggggtggggtggagtcgcagaccagagctgtctgaactcacgtgtcagaagcctccaagcctgcctcccaaggtcctctcagttctctcccttcctctctccttatagacacttgctcccaacccattcactacaggtgaaggctctcaccccatccctgggggccttgggtgagtggcctgctaaggctcctccttgcccagactacagggcttaggacttggtttgttatatcagggaaaaggagtagggagttcatctggagggttctaagtgggagaaggactatcaacaccactaggaatcccagaggtgggatcctccctcatggctctggcacagtgtaatccaggggtgtagatgggggaactgtgaatacttgaactctgttcccccaccctccatgctcctcacctgtctaggtctcctcagggtggggggtgacagtgccttctctattgggcacagcctagggtcttgggggtcaggggggagaagttcttgattcagccaaatgcagggaggggaggcagatggagcccataggccaccccctatcctctgagtgtttggaaataaactgtgcaatcccctca

SEQ ID NO: 1475 - DNA, 1818 bp; single-stranded, linear
  immediate source library: GENBANK
  immediate source clone: g765255
accacaccaagcagcggctgggggggggaaagacgaggaaagaggaggaaaacaaaagctgctacttatggaagatacaaaggagtctaacgtgaagacattttgctccaagaatatcctagccatccttggcttctcctctatcatagctgtgatagctttgcttgctgtggggttgacccagaacaaagcattgccagaaaacgttaagtatgggattgtgctggatgcgggttcttctcacacaagtttatacatctataagtggccagcagaaaaggagaatgacacaggcgtggtgcatcaagtagaagaatgcagggttaaaggtcctggaatctcaaaatttgttcagaaagtaaatgaaataggcatttacctgactgattgcatggaaagagctagggaagtgattccaaggtcccagcaccaagagacacccgtttacctgggagccacggcaggcatgcggttgctcaggatggaaagtgaagagttggcagacagggttctggatgtggtggagaggagcctcagcaactacccctttgacttccagggtgccaggatcattactggccaagaggaaggtgcctatggctggattactatcaactatctgctgggcaaattcagtcagaaaacaaggtggttcagcatagtcccatatgaaaccaataatcaggaaacctttggagctttggaccttgggggagcctctacacaagtcacttttgtaccccaaaaccagactatcgagtccccagataatgctctgcaatttcgcctctatggcaaggactacaatgtctacacacatagcttcttgtgctatgggaaggatcaggcactctggcagaaactggccaaggacattcaggttgcaagtaatgaaattctcagggacccatgctttcatcctggatataagaaggtagtgaacgtaagtgacctttacaagaccccctgcaccaagagatttgagatgactcttccattccagcagtttgaaatccagggtattggaaactatcaacaatgccatcaaagcatcctggagctcttcaacaccagttactgcccttactcccagtgtgccttcaatgggattttcttgccaccactccagggggattttggggcattttcagctttttactttgtgatgaagtttttaaacttgacatcagagaaagtctctcaggaaaaggtgactgagatgatgaaaaagttctgtgctcagccttgggaggagataaaaacatcttacgctggagtaaaggagaagtacctgagtgaatactgcttttctggtacctacattctctccctccttctgcaaggctatcatttcacagctgattcctgggagcacatccatttcattggcaagatccagggcagcgacgccggctggactttgggctacatgctgaacctgaccaacatgatcccagctgagcaaccattgtccacacctctctcccactccacctatgtcttcctcatggttctattctccctggtccttttcacagtggccatcataggcttgcttatctttcacaagccttcatatttctggaaagatatggtatagcaaaagcagctgaaatatgctggctggagtgaggaaaaaatcgtccagggagcattttcctccatcgcagtgttcaaggccatccttccctgtctgccagggccagtcttgacgagtgtgaagcttccttggcttttactgaagcctttcttttggaggtattcaatatcctttgcctcaaggacttcggcagatactgtctctttcatgagtttttc

SEQ ID NO: 1476 - DNA, 1596 bp; single-stranded, linear
  immediate source library: GENBANK
  immediate source clone: g780305
agctggggcgcggccgcctgtctgcacagacagcaccatgtcgctcatggtcgtcagcatggtgtgtgttgggttcttcttgctgcagggggcctggccacatgagggagtccacagaaaaccttccctcctggcccacccaggtcccctggtgaaatcagaagagacagtcatcctgcaatgttggtcagatgtcaggtttcagcacttccttctgcacagagaagggaagtttaaggacactttgcacctcattggagagcaccatgatggggtctccaaggccaacttctccatcggtcccatgatgcaagaccttgcagggacctacagatgctacggttctgttactcactccccctatcagttgtcagctcccagtgaccctctggacatcgtcatcacaggtctatatgagaaaccttctctctcagcccagccgggccccacggttctggcaggagagagcgtgaccttgtcctgcagctcccggagctcctatgacatgtaccatctatccagggagggggaggcccatgaacgtaggttctctgcagggcccaaggtcaacggaacattccaggccgactttcctctgggccctgccacccacggaggaacctacagatgcttcggctctttccgtgactctccatacgagtggtcaaactcgagtgacccactgcttgtttctgtcacaggaaacccttcaaatagttggccttcacccactgaaccaagctccgaaaccggtaaccccagacacctgcatgttctgattgggacctcagtggtcatcatcctcttcatcctcctcctcttctttctccttcatcgctggtgctgcaacaaaaaaaatgctgttgtaatggaccaagagcctgcagggaacagaacagtgaacagggaggactctgatgaacaagaccctcaggaggtgacatatgcacagttgaatcactgcgttttcacacagagaaaaatcactcgcccttctcagaggcccaagacacccccaacagatatcatcgtgtacacggaacttccaaatgctgagccctgatccaaagttgtctcctgcccatgagcaccacagtcaggccttgaggggatcttctagggagacaacagccctgtctcaaaactgggttgccagctccaatgtaccagcagctggaatctgaaggcgtgagtctgcatcttagggcatcgctcttcctcacaccacaaatctgaacgtgcctctcccttgcttacaaatgtctaaggtccccactgcctgctggagagaaaacacactcctttgcttagcccacaattctccatttcacttgacccctgcccacctctccaacctaactggcttacttcctagtctacttgaggctgcaatcacactgaggaactcacaattccaaacatacaagaggctccctcttaacacggcacttagacacgtgctgttccaccttccctcatgctgttccacctcccctcagactagctttcagccttctgtcagcagtaaaacttatatattttttaaaataatttcaatgtagttttccctccttcaaataaacatgtctgccctca

SEQ ID NO: 1477 - DNA, 3680 bp; single-stranded, linear
  immediate source library: GENBANK
  immediate source clone: g780373
gctgcagcaccctgggccacgccgatgactactgcaaactgtggcgcccacgacgagctcgacttcaaactcgtctttggcgaggacggggcgccggcgccgccgcccccgggctcgcggcctgcagatcttgagccagatgattgtgcatccatttacatctttaatgtagatccacctccatctactttaaccacaccactttgcttaccacatcatggattaccgtctcactcttctgttttgtcaccatcgtttcagctccaaagtcacaaaaactatgaaggaacttgtgagattcctgaatctaaatatagcccattaggtggtcccaaaccctttgagtgcccaagtattcaaattacatctatctctcctaactgtcatcaagaattagatgcacatgaagatgacctacagataaatgacccagaacgggaatttttggaaaggccttctagagatcatctctatcttcctcttgagccatcctaccgggagtcttctcttagtcctagtcctgccagcagcatctcttctaggagttggttctctgatgcatcttcttgtgaatcgctttcacatatttatgatgatgtggactcagagttgaatgaagctgcagcccgatttacccttggatcccctctgacttctcctggtggctctccagggggctgccctggagaagaaacttggcatcaacagtatggacttggacactcattatcacccaggcaatctccttgccactctcctagatccagtgtcactgatgagaattggctgagccccaggccagcctcaggaccctcatcaaggcccacatccccctgtgggaaacggaggcactccagtgctgaagtttgttatgctgggtccctttcaccccatcactcacctgttccttcacctggtcactcccccaggggaagtgtgacagaagatacgtggctcaatgcttctgtccatggtgggtcaggccttggccctgcagtttttccatttcagtactgtgtagagactgacatccctctcaaaacaaggaaaacttctgaagatcaagctgccatactaccaggaaaattagagctgtgttcagatgaccaagggagtttatcaccagcccgggagacttcaatagatgatggccttggatctcagtatcctttaaagaaagattcatgtggtgatcagtttctttcagttccttcaccctttacctggagcaaaccaaagcctggccacacccctatatttcgcacatcttcattacctccactagactggcctttaccagctcattttggacaatgtgaactgaaaatagaagtgcaacctaaaactcatcatcgagcccattatgaaactgaaggtagccgaggggcagtaaaagcatctactgggggacatcctgttgtgaagctcctgggctataacgaaaagccaataaatctacaaatgtttattgggacagcagatgatcgatatttacgacctcatgcattttaccaggtgcatcgaatcactgggaagacagtcgctactgcaagccaagagataataattgccagtacaaaagttctggaaattccacttcttcctgaaaataatatgtcagccagtattgattgtgcaggtattttgaaactccgcaattcagatatagaacttcgaaaaggagaaactgatattggcagaaagaatactagagtacgacttgtgtttcgtgtacacatcccacagcccagtggaaaagtcctttctctgcagatagcctctatacccgttgagtgctcccagcggtctgctcaagaacttcctcatattgagaagtacagtatcaacagttgttctgtaaatggaggtcatgaaatggttgtgactggatctaattttcttccagaatccaaaatcatttttcttgaaaaaggacaagatggacgacctcagtgggaggtagaagggaagataatcagggaaaaatgtcaaggggctcacattgtccttgaagttcctccatatcataacccagcagttacagctgcagtgcaggtgcacttttatctttgcaatggcaagaggaaaaaaagccagtctcaacgttttacttatacaccagttttgatgaagcaagaacacagagaagagattgatttgtcttcagttccatctttgcctgtgcctcatcctgctcagacccagaggccttcctctgattcagggtgttcacatgacagtgtactgtcaggacagagaagtttgatttgctccatcccacaaacatatgcatccatggtgacctcatcccatctgccacagttgcagtgtagagatgagagtgttagtaaagaacagcatatgattccttctccaattgtacaccagccttttcaagtcacaccaacacctcctgtggggtcttcctatcagcctatgcaaactaatgttgtgtacaatggaccaacttgtcttcctattaatgctgcctctagtcaagaatttgattcagttttgtttcagcaggatgcaactctttctggtttagtgaatcttggctgtcaaccactgtcatccataccatttcattcttcaaattcaggctcaacaggacatctcttagcccatacacctcattctgtgcataccctgcctcatctgcaatcaatgggatatcattgttcaaatacaggacaaagatctctttcttctccagtggctgaccagattacaggtcagccttcgtctcagttacaacctattacatatggtccttcacattcagggtctgctacaacagcttccccagcagcttctcatcccttggctagttcaccgctttctgggccaccatctcctcagcttcagcctatgccttaccaatctcctagctcaggaactgcctcatcaccgtctccagccaccagaatgcattctggacagcactcaactcaagcacaaagtacgggccaggggggtctttctgcaccttcatccttaatatgtcacagtttgtgtgatccagcgtcatttccacctgatggggcaactgtgagcattaaacctgaaccagaagatcgagagcctaactttgcaaccattggtctgcaggacatcactttagatgatgtgaacgagataattgggagagacatgtcccagatttctgtttcccaaggagcaggggtgagcaggcaggctcccctcccgagtcctgagtccctggatttaggaagatctgatgggctctaacagtgcttactgcagccttgtgtccaccaccaacttctcagcatgtttctctccttggaccttgggtttccaactctgcagccttcaggtctggggccaggagtgggacccaccatttgtggggaaagtagcattcctccacctcaggccttgggtagatttggcaaaagaacaggagcagcataggctgtttgagctttggggaaatgaactttgctttttatatttaactaggatacttttatatgatgggtgctttgagtgtgaatgcagcaggctctcttgtttccgaggtgctgcttttgcaggtgacctggttacttagctaggattggtgatttgtactgctttatggtcatttgaagggccctttagtttttatgataatttttaaaataggaacttttgataagaccttctagaagcaa

SEQ ID NO: 1478 - DNA, 3149 bp; single-stranded, linear
  immediate source library: GENBANK
  immediate source clone: g784993
ctaaagtttttttctttgaatgacagaactacagcataatgcgtggcttcaacctgctcctcttctggggatgttgtgttatgcacagctgggaagggcacataagacccacacggaaaccaaacacaaagggtaataactgtagagacagtaccttgtgcccagcttatgccacctgcaccaatacggtggacagttactattgcacttgcaaacaaggcttcctgtccagcaatgggcaaaatcacttcaaggatccaggagtgcgatgcaaagatattgatgaatgttctcaaagcccccagccctgtggtcctaactcatcctgcaaaaacctgtcagggaggtacaagtgcagctgtttagatggtttctcttctcccactggaaatgactgggtcccaggaaagccgggcaatttctcctgtactgatatcaatgagtgcctcaccagcagggtctgccctgagcattctgactgtgtcaactccatgggaagctacagttgcagctgtcaagttggattcatctctagaaactccacctgtgaagacgtgaatgaatgtgcagatccaagagcttgcccagagcatgcaacttgtaataacactgttggaaactactcttgtttctgcaacccaggatttgaatccagcagtggccacttgagttgccagggtctcaaagcatcgtgtgaagatattgatgaatgcactgaaatgtgccccatcaattcaacatgcaccaacactcctgggagctacttttgcacctgccaccctggctttgcaccaagcagtggacagttgaatttcacagaccaaggagtggaatgtagagatattgatgagtgccgccaagatccatcaacctgtggtcctaattctatctgcaccaatgccctgggctcctacagctgtggctgcattgtaggctttcatcccaatccagaaggctcccagaaagatggcaacttcagctgccaaagggttctcttcaaatgtaaggaagatgtgatacccgataataagcagatccagcaatgccaagagggaaccgcagtgaaacctgcatatgtctccttttgtgcacaaataaataacatcttcagcgttctggacaaagtgtgtgaaaataaaacgaccgtagtttctctgaagaatacaactgagagctttgtccctgtgcttaaacaaatatccatgtggactaaattcaccaaggaagagacgtcctccctggccacagtcttcctggagagtgtggaaagcatgacactggcatctttttggaaaccctcagcaaatgtcactccggctgttcgggcggaatacttagacattgagagcaaagttatcaacaaagaatgcagtgaagagaatgtgacgttggacttggtagccaagggggataagatgaagatcgggtgttccacaattgaggaatctgaatccacagagaccactggtgtggcttttgtctcctttgtgggcatggaatcggttttaaatgagcgcttcttccaagaccaccaggctcccttgaccacctctgagatcaagctgaagatgaattctcgagtcgttgggggcataatgactggagagaagaaagacggcttctcagatccaatcatctacactctggagaacgttcagccaaagcagaagtttgagaggcccatctgtgtttcctggagcactgatgtgaagggtggaagatggacatcctttggctgtgtgatcctggaagcttctgagacatataccatctgcagctgtaatcagatggcaaatcttgccgttatcatggcgtctggggagctcacgatggacttttccttgtacatcattagccatgtaggcattatcatctccttggtgtgcctcgtcttggccatcgccacctttctgctgtgtcgctccatccgaaatcacaacacctacctccacctgcacctctgcgtgtgtctcctcttggcgaagactctcttcctcgccggtatacacaagactgacaacaagacgggctgcgccatcatcgcgggcttcctgcactaccttttccttgcctgcttcttctggatgctggtggaggctgtgatactgttcttgatggtcagaaacctgaaggtggtgaattacttcagctctcgcaacatcaagatgctgcacatctgtgcctttggttatgggctgccgatgctggtggtggtgatctctgccagtgtgcagccacagggctatggaatgcataatcgctgctggctgaatacagagacagggttcatctggagtttcttggggccagtttgcacagttatagtgatcaactcccttctcctgacctggaccttgtggatcctgaggcagaggctttccagtgttaatgccgaagtctcaacgctaaaagacaccaggttactgaccttcaaggcctttgcccagctcttcatcctgggctgctcctgggtgctgggcatttttcagattggacctgtggcaggtgtcatggcttacctgttcaccatcatcaacagcctgcagggggccttcatcttcctcatccactgtctgctcaacggccaggtacgagaagaatacaagaggtggatcactgggaagacgaagcccagctcccagtcccagacctcaaggatcttgctgtcctccatgccatccgcttccaagacgggttaaagcctttcttgctttcaaatatgctatggagccacagttgaggacagtagtttcctgcaggagcctaccctgaaatctcttctcagcttaacatggaaatgaggatcccaccagccccagaaccctctggggaagaatgttgggggccgtcttcctgtggttgtatgcactgatgagaaatcagacgtttctgctccaaacgaccattttatcttcgtgctctgcaacttcttcaattccagagtttctgagaacagacccaaattcaatggcatgaccaagaacacctggctaccattttgttttctcctgcccttgttggtgcatggttctaagcgtgcccctccagcgcctatcatacgcctgacacagagaacctctcaataaatgatttgtcgcctgtctgactgatttaccctaaaaaaaaaaaaaaaaaaaaaaaaaaaaaaa

SEQ ID NO: 1479 - DNA, 1969 bp; single-stranded, linear
  immediate source library: GENBANK
  immediate source clone: g791184
gccacacggtctttgagctgagtcgaggtggaccctttgaacgcagtcgccctacagccgctgattccccccgcatcgcctcccgtggaagcccaggcccgcttcgcagctttctccctttgtctcataaccatgtccaccaacgagaatgctaatacaccagctgcccgtcttcacagattcaagaacaagggaaaagacagtacagaaatgaggcgtcgcagaatagaggtcaatgtggagctgaggaaagctaagaaggatgaccagatgctgaagaggagaaatgtaagctcatttcctgatgatgctacttctccgctgcaggaaaaccgcaacaaccagggcactgtaaattggtctgttgatgacattgtcaaaggcataaatagcagcaatgtggaaaatcagctccaagctactcaagctgccaggaaactactttccagagaaaaacagccccccatagacaacataatccgggctggtttgattccgaaatttgtgtccttcttgggcagaactgattgtagtcccattcagtttgaatctgcttgggcactcactaacattgcttctgggacatcagaacaaaccaaggctgtggtagatggaggtgccatcccagcattcatttctctgttggcatctccccatgctcacatcagtgaacaagctgtctgggctctaggaaacattgcaggtgatggctcagtgttccgagacttggttattaagtacggtgcagttgacccactgttggctctccttgcagttcctgatatgtcatctttagcatgtggctacttacgtaatcttacctggacactttctaatctttgccgcaacaagaatcctgcacccccgatagatgctgttgagcagattcttcctaccttagttcggctcctgcatcatgatgatccagaagtgttagcagatacctgctgggctatttcctaccttactgatggtccaaatgaacgaattggcatggtggtgaaaacaggagttgtgccccaacttgtgaagcttctaggagcttctgaattgccaattgtgactcctgccctaagagccatagggaatattgtcactggtacagatgaacagactcaggttgtgattgatgcaggagcactcgccgtctttcccagcctgctcaccaaccccaaaactaacattcagaaggaagctacgtggacaatgtcaaacatcacagccggccgccaggaccagatacagcaagttgtgaatcatggattagtcccattccttgtcagtgttctctctaaggcagattttaagacacaaaaggaagctgtgtgggccgtgaccaactataccagtggtggaacagttgaacagattgtgtaccttgttcactgtggcataatagaaccgttgatgaacctcttaactgcaaaagataccaagattattctggttatcctggatgccatttcaaatatctttcaggctgctgagaaactaggtgaaactgagaaacttagtataatgattgaagaatgtggaggcttagacaaaattgaagctctacaaaaccatgaaaatgagtctgtgtataaggcttcgttaagcttaattgagaagtatttctctgtagaggaagaggaagatcaaaacgttgtaccagaaactacctctgaaggctacactttccaagttcaggatggggctcctgggacctttaacttttagatcatgtagctgagacataaatttgttgtgtactacgtttggtattttgtcttattgtttctctactaagaactctttcttaaatgtggtttgttactgtagcactttttacactgaaactatacttgaacagttccaactgtacatacatactgtatgaagcttgtcctctgactaggtttctaatttctatgtggaatttcctatcttgcagcatcctgtaaataaacattcaagtccaccctta

SEQ ID NO: 1480 - DNA, 630 bp; single-stranded, linear
  immediate source library: GENBANK
  immediate source clone: g793842
gttcgggagccgcggcttatggtgcagacatggccaagtccaagaaccacaccacacacaaccagtcccgaaaatggcacagaaatggtatcaagaaaccccgatcacaaagatacgaatctcttaagggggtggaccccaagttcctgaggaacatgcgctttgccaagaagcacaacaaaaagggcctaaagaagatgcaggccaacaatgccaaggccatgagtgcacgtgccgaggctatcaaggccctcgtaaagcccaaggaggttaagcccaagatcccaaagggtgtcagccgcaagctcgatcgacttgcctacattgcccaccccaagcttgggaagcgtgctcgtgcccgtattgccaaggggctcaggctgtgcgcgccaaaggccaaggccaaggccaaggccaaggatcaaaccaaggcccaggctgcagccccagcttcagttccagctcaggctcccaaacgtacccaggcccctacaaaggcttcagagtagatatctctgccaacatgaggacagaaggactggtgcgaccccccacccccgcccctgggctaccatctgcatggggctggggtcctcctgtgctatttgtacaaataaacctgaggcagga

SEQ ID NO: 1481 - DNA, 1360 bp; single-stranded, linear
  immediate source library: GENBANK
  immediate source clone: g804984
acagggacaagtaaaggctacatccagatgccgggaatgcactgacgcccattcctggaaactgggctcccactcagcccctgggagcagcagccgccagcccctcgggacctccatctccaccctgctgagccacccgggttgggccaggatcccggcaggctgatcccgtcctccactgagacctgaaaaatggcttcggggcaaggcccaggtcctcccaggcaggagtgcggagagcctgccctgccctctgcttctgaggagcaggtagcccaggacacagaggaggttttccgcagctacgttttttaccgccatcagcaggaacaggaggctgaaggggtggctgcccctgccgacccagagatggtcaccttacctctgcaacctagcagcaccatggggcaggtgggacggcagctcgccatcatcggggacgacatcaaccgacgctatgactcagagttccagaccatgttgcagcacctgcagcccacggcagagaatgcctatgagtacttcaccaagattgccaccagcctgtttgagagtggcatcaattggggccgtgtggtggctcttctgggcttcggctaccgtctggccctacacgtctaccagcatggcctgactggcttcctaggccaggtgacccgcttcgtggtcgacttcatgctgcatcactgcattgcccggtggattgcacagaggggtggctgggtggcagccctgaacttgggcaatggtcccatcctgaacgtgctggtggttctgggtgtggttctgttgggccagtttgtggtacgaagattcttcaaatcatgactcccaagggtgccctttgggtcccggttcagacccctgcctggacttaagcgaagtctttgccttctctgttcccttgcaggggtcccccctcaagagtacagaagctttagcaagtgtgcactccagcttcggagggcccctgcgtgggggcagtcaggctgcagaggcacctcaacattgcatggtgctagtgggccctctctctgggccaggggtgtgccgtctcctccctcagctctctgggacctccttaaaccctgtcctgctaggcgctggggagactgataacttggggagacaagagactgggacccacttctccccaggaagtgtttaacggttttagctttttataatacccttgtgagagcccattcccaccattctacctgaggccaggacgtctggggtgtggggattggtgggtctatgttccccaggattcagctattctggaagatcagcaccctaagagatgggactaggacctgatcctggtcctggccgtccctaagcatgtgtcccaggg

SEQ ID NO: 1482 - DNA, 4407 bp; single-stranded, linear
  immediate source library: GENBANK
  immediate source clone: g806640
cgccagctcagcctcccaaagtgctgggattacaggtgtgagccaccacacccagccaagtttaacagcttttgaaagtcttttttttttttaggctgggtacagtggctcatgcctgtatcccagcactttgggaggccgaggtgggcagatcacttggtcaggagttcgagaccagcctggccaaaatggttgaaacccatctctactaaaaaattacttgggcgtggtggtgggcacctgtagtcccagctactcgggaggctgaggcgggagaatcccttgaacccaggaggtggaggttgcagtcagctgagatcatgccattgccctccagcctgggcgaccgacgagcaaaactgtctcaaaaaaagaaaaaaaaatcttttagatgaatttgaatactttttacttactatatctatgccacactattagctaaaaggactatttttttttctttgctaggagccggtgaaacctgaagaaggcagagatatggcaaacaggattggcgcttttgggtacatggagtgttcagcaaagaccaaagatggagtgagagaggtttttgaaatggctacgagagctgctctgcaagctagacgtgggaagaaaaaatctgggtgccttgtcttgtgaaaccttgctgcaagcacagcccttatgcggttaattttgaagtgctgtttattaacttagtgtatattactggcctttttcatttatctataatttacctaagattacaaatcagaagtcatcttgctaccagtatttagaagccaactatgattattaacgatgtccaacccgtctggcccaccagggtccttttgacactgctctaacagccctcctctgcactcccacctgacacaccaggcgctaattcaaggaatttcttaacttcttgcttctttctagaaagagaaacagttggtaacttttgtgaattaggctgtaactactttataactaacatgtcctgcctattatctgtcagctgcaaggtactctggtgagtcaccacttcagggctttactccgtaacagattttgttggcatagctctggggtgggcagttttttgaaaatgggctcaaccagaaaagcccaagttcatgcagctgtggcagagttacagttctgtggtttcatgttagttaccttatagttactgtgtaattagtgccacttaatgtatgttaccaaaaataaatatatctaccccagactagatgtagtatttttggataattggatttcctaatactgtcatcctcaaagaaagtgtattggttttttaaaaaagaaagtgtatttggaaataaagtcagatggaaaattcattttttaaattcccgttttgtcactttttctgataaaagatggccatattaccccttttcggccccatgtatctcagtaccccatggagctgggctaagtaaataggaattggtttcacgcctgaggcaattagacactttggaagatggcataacctgtctcacctggacttaagcgtctggctctaattcacagtgctcttttctcctcactgtatccaggttccctcccagaggagccaccagttctcatgggtggcactcagtctctcttctctccagctgactaaacttttttctgtaccagttaatttttccaactactaatagaataaaggcagttttctaaacttcctgtatcctgttgtttgtgttgctctctccagggctgggggtaggaggatgcaaggacttcctggcctagctcaccctggagaggtttgttgagtgcaaaggactagcttgtgccccacctcccacccacccagcagctatctggtccctcccaacaacatggaaatgttaccctgtaccgcattctggttcagatttggggtagggtgagtgcagccctgaggaggccagggagggaggactccggcagcgtttccttggcctcggcgagctactgggctccacttaaggaggctgggcagagcttccaggactctgcccggttagaaaaccgcacgagggcggtgccgctttggagacagggaggagggagaccggaagcctagatccctctggctgtcccctgcactgccggtaacatggcacaggagaggagggctgtttgtgcacgggcagctcctgcagctgctgccgtcgcccaccagcctcctatgccaaaccccacatcctaactcaggaacctctgagaaaaaacggagccctcgaggggcccagcttggaagggtaacctggaccgctgccgcctggttgcctgggccagaccagacatgcctgctgctccttccggcttaggaggagcacgcgtcccgctcgggcgcactctccagccttttcctggctgaggaggggccgagcctccgggtagggcgggggcggatgaggcgggaccctcaggcccggaaaactgcctgtgccacgtgacccgccggccagttaaaaggaggcgcctgctggcctccccttatagtgcttgttcggggcgctccgctggcttcttggacaattgcgccatgtgtgctgctcggctagcggcggcggcggcggcccagtcggtgtatgccttctcggcgcgcccgctggccggcggggagcctgtgagcctgggctccctgcggggcaaggtactacttatcgagaatgtggcgtccctctgaggcaccacggtccgggactacacccagatgaacgagctgcagcggcgcctcggaccccggggcctggtggtgctcggcttcccgtgcaaccagtttgggcatcaggtgcgccgggcggagcggggcggggcgggggcggacgtgcagtagtggctgggggcgccggcggtgtgctggtgggtgccgtcgctccatgcgcggagagtctggctactctctcgtttcctttctgttgctcgtagctgctgaaattcctctccgcccttgggattgcgcatggaggcaaaatcccggtgactcatagaaaatctcccttgtttggttagaacgtttctctcctcctcttgaccccgggttctagctgcccttctctcctgtaggagaacgccaagaacgaagagattctgaattccctcaagtacgtccggcctggtggtgggttcgagcccaacttcatgctcttcgagaagtgcgaggtgaacggtgcgggggcgcaccctctcttcgccttcctgcgggaggccctgccagctcccagcgacgacgccaccgcgcttatgaccgaccccaagctcatcacctggtctccggtgtgtcgcaacgatgttgcctggaactttgagaagttcctggtgggccctgacggtgtgcccctacgcaggtacagccgccgcttccagaccattgacatcgagcctgacatcgaagccctgctgtctcaagggctcagctgtgcctagggcgccctcctaccccggctgcttggcagttgcagtgctgctgtctcgggggggttttcatctatgagggtgtttcctctaaacctacgagggaggaacacctgatcttacagaaaataccacctcgagatgggtgctggtcctgttgatcccagtctctgccagaccaaggcgagtttccccactaataaagtgccgggtgtcagcagaactgtgtgtatgtcctgtgtcattgtcatttgggaattctttttcttttctttttttttttttttttttgagacggagtttttgctctattgcccaggctggagtgcagtggcgcaatctaggctcactgcaagctccgcctcccgggttcacgccattctcctgcctcaacctcctgagtagctgggactacaggtgcctgccaccacgcccggctaattttttgtatttttagtagagacagggtttcaccgtgttagccaggatggtatcgatctcctgacctcgtgatccacccgcctcggcctcccaaagtgctgggattacaggtatgagccaccgcacccggcctggcgatactttttctaacctcattgtcatagtggtgggaacctccttccttatcctagccaagtctgaactttctgccttttgtctgcgcgtgtaggatccactctttcctttgtgggaagtctggctcctggcctgcatttctgccttcaccagaacatgcaaagggccatctcaagacccagttacaacaaagtccttacttcaaaaaagacacaaggcaatggttgactgcctaactcaaatgatagacttctgactacttgctgcacgctgaaatgactgtcacaaaataacatgagcccccactcacatttggagtcatggcctctccaattgttaggtccacacaatcccattttacacggaagctcatgcaatgttataaattctgttatctggcta

SEQ ID NO: 1483 - DNA, 2032 bp; single-stranded, linear
  immediate source library: GENBANK
  immediate source clone: g806765
ctggttcggcccacctctgaaggttccagaatcgatagtgaattcgtggaagagaccatatttgttcgcagaggaagccgttgctttctgggatctggctacggcagaaaagacatcggctccaacaggggtgttccacagggtagctgggagttggaagagccaagaacgcctccgagctctggatttgagcttctctgcccatgggtgaagcgcccatgctcagcttgtgagcttcttcccgggagagcagccatggcactgaggaatgtgccctttcgctcagaggtcctgggctgggaccccgacagccttgctgactatttcaagaagctcaactataaggactgtgagaaggcagtgaagaagtaccacatcgatggggctcgcttcttgaacctgacagaaaatgacatccagaagttccccaagctccgggtgccgattctcagtaagttaagtcaggaaatcaacaagaacgaagagaggaggagcatcttcacacgcaaaccccaagtcccgcggtttcctgaagagacagaaagccacgaagaggacaatgggggttggtcgtcctttgaagaagacgattatgaaagtcccaatgatgaccaggatggggaggatgatggagactatgagtcccccaatgaggaggaagaggcacccgtggaagatgacgcggattatgagccgccaccctccaatgacgaggaagctctgcagaactccatcctgcctgccaagcctttccccaactccaactccatgtacatcgaccggcccccctctgggaaaaccccccagcagcctcctgtgcccccccagagaccgatggccgccctcccgcccccaccagccggccggaatcactcgccactgcccccaccccagaccaaccacgaagaacccagcagaagcagaaaccacaaaacggcaaagctccctgctccttcaatagacagaagcacgaaacctcccctagatcgttcattagctccgtttgatagagaacccttcacactaggaaagaaaccaccattttctgacaagccctcgattccagcgggaaggtcactcggggagcatttacccaagattcaaaagcctcctttaccaccgaccacggaaagacatgaaaggagcagccccctgccagggaagaagccacctgtgccaaagcatggatggggaccagacagaagagagaatgatgaagatgatgtgcatcagagacctttgccccagccagcactacttcctatgagctccaacactttcccttcaagatctactaagccaagtcccatgaaccctctcccatcctctcacatgcctggagcattctcagaaagtaacagcagttttccacagagtgcctccctgccaccatacttctctcaaggccctagcaacagaccacctatcagagccgaaggcagaaacttccccttgccacttccaaacaaacctcggcccccatcccccgcggaggaagagaattcattaaatgaagagtggtacgtttcttatattacccgaccagaggcagaagctgctcttagaaagataaaccaggatggcacatttctggtcagagacagctctaaaaaaacaacaaccaatccatatgtcctcatggtgttgtacaaagataaagtttacaacatccagatccgttatcagaaggaaagtcaagtttacttgttgggaactggactccgagggaaagaggactttctgtctgtgtcagatattattgactacttcaggaaaatgccacttctgctcattgatgggaaaaaccgaggttccagataccagtgcacattaacgcatgctgcagggtacccatagcaagttatagccgagcaaatgaaccgtcctcctgcctctgttgccaacacgagatcaatcagccttggtcaatggacaaacacttaggactgaactgaacccctccccatgaacacaagggttttatcctttcctttaaaaacagtgtttgaaatgaagactgtcaactatcccc

SEQ ID NO: 1484 - DNA, 1435 bp; single-stranded, linear
  immediate source library: GENBANK
  immediate source clone: g808914
ctggcgggcgtgggaacccaggccccgccgaggcggccaggaggtgagatggcagctgggcaaaatgggcacgaagagtgggtgggcagcgcatacctgtttgtggagtcctcgctggacaaggtggtcctgtcggatgcctacgcgcacccccagcagaaggtggcagtgtacagggctctgcaggctgccttggcagagagcggcgggagcccggacgtgctgcagatgctgaagatccaccgcagcgacccgcagctgatcgtgcagctgcgattctgcgggcggcagccctgtggccgcttcctccgcgcctaccgcgagggggcgctgcgcgccgcgctgcagaggagcctggcggccgcgctcgcccagcactcggtgccgctgcaactggagctgcgcgccggcgccgagcggctggacgctttgctggcggacgaggagcgctgtttgagttgcatcctagcccagcagcccgaccggctccgggatgaagaactggctgagctggaggatgcgctgcgaaatctgaagtgcggctcgggggcccggggtggcgacggggaggtcgcttcggcccccttgcagcccccggtgccctctctgtcggaggtgaagccgccgccgccgccgccacctgcccagacttttctgttccagggtcagcctgtagtgaatcggccgctgagcctgaaggaccaacagacgttcgcgcgctctgtgggtctcaaatggcgcaaggtggggcgctcactgcagcgaggctgccgggcgctgcgggacccggcgctggactcgctggcctacgagtacgagcgcgagggactgtacgagcaggccttccagctgctgcggcgcttcgtgcaggccgagggccgccgcgccacgctgcagcgcctggtggaggcactcgaggagaacgagctcaccagcctggcagaggacttgctgggcctgaccgatcccaatggcggcctggcctagaccaggggtgcagccagcttttggagaacctggatggccttagggttccttctgcggctattgctgaacccctgtccatccacgggaccctgaaactccacttggcctatctgctggacctgctggggcagagttgattgccttccccaggagccagaccactgggggtgcatcattggggattctgcctcaggtactttgatagagtgtggggtgggggggacttgctttggagatcagcctcaccttctcccatcccagaagcggggcttacagccagcccttacagtttcactcatgaagcaccttgatctttggtgtcctggacttcatcctgggtgctgcagatactgcagtgaagtaaaacaggaatcaatcttgcctgcccccagctcacactcagcgtgggaccccgaatgttaagcaatgataataaagtataacacgg

SEQ ID NO: 1485 - DNA, 1642 bp; single-stranded, linear
  immediate source library: GENBANK
  immediate source clone: g809486
ctctaaaggttcgggggtggaatccttgggccgctgggcaagcggcgagacctggccagggccagcgagccgaggacagagggcgcacggagggccgggccgcagccccggccgcttgcagaccccgccatggacccgttcctggtgctgctgcactcggtgtcgtccagcctgtcgagcagcgagctgaccgagctcaagttcctatgcctcgggcgcgtgggcaagcgcaagctggagcgcgtgcagagcggcctagacctcttctccatgctgctggagcagaacgacctggagcccgggcacaccgagctcctgcgcgagctgctcgcctccctgcggcgccacgacctgctgcggcgcgtcgacgacttcgaggcgggggcggcggccggggccgcgcctggggaagaagacctgtgtgcagcatttaacgtcatatgtgataatgtggggaaagattggagaaggctggctcgtcagctcaaagtctcagacaccaagatcgacagcatcgaggacagatacccccgcaacctgacagagcgtgtgcgggagtcactgagaatctggaagaacacagagaaggagaacgcaacagtggcccacctggtgggggctctcaggtcctgccagatgaacctggtggctgacctggtacaagaggttcagcaggcccgtgacctccagaacaggagtggggccatgtccccgatgtcatggaactcagacgcatctacctccgaagcgtcctgatgggccgctgctttgcgctggtggaccacaggcatctacacagcctggactttggttctctccaggaaggtagcccagcactgtgaagacccagcaggaagccaggctgagtgagccacagaccacctgcttctgaactcaagctgcgtttattaatgcctctcccgcaccaggccgggcttgggccctgcacagatatttccatttcttcctcactatgacactgagcaagatcttgtctccactaaatgagctcctgcgggagtagttggaaagttggaaccgtgtccagcacagaaggaatctgtgcagatgagcagtcacactgttactccacagcggaggagaccagctcagaggcccaggaatcggagcgaagcagagaggtggagaactgggatttgaacccccgccatccttcaccagagcccatgctcaaccactgtggcgttctgctgcccctgcagttggcagaaaggatgttttgtcccatttccttggaggccaccgggacagacctggacactagggtcaggcggggtgctgtggtggggagaggcatggctggggtgggggtggggagacctggttggccgtggtccagctcttggcccctgtgtgagttgagtctcctctctgagactgctaagtaggggcagtgatggttgccaggacgaattgagataatatctgtgaggtgctgatgagtgattgacacacagcactctctaaatcttccttgtgaggattatgggtcctgcaattctacagtttcttactgttttgtatcaaaatcactatctttctgataacagaattgccaaggcagcgggatctcgtatctttaaaaagcagtcctcttattcctaaggtaatcctattaaaa

SEQ ID NO: 1486 - DNA, 4208 bp; single-stranded, linear
  immediate source library: GENBANK
  immediate source clone: g818001
tctttaagatttgtagctactaagaaagaaaggagctttttttccttgggccttcaaactgaaagaaccgcatgagcctgacggcgcatggtcttaacatcaggctgtgcaggaagaagctatctgcagatggatgccagcacacacaaggaagcagagctctggcaacattgagtcaaagcaaggacacaacatcagagggacggcagagaatccttgtgtgtagtctttggtggcagtttgaaaattgcaaggagggactttaagactacttctgatttgcaaagatggtctgtgctccgagcaggctaaagtgactggacgagacgcactgttggagaaataaaaatgacttcccattatgtgattgccatctttgccctgatgagcttctgtttagccactgcaggtccagagcctggtgcactgtgtgaactgtcacctgtcagtgcctcccatcctgtccaggccttgatggagagcttcactgttttgtcaggctgtgccagcagaggcacaactgggctgccacaggaggtgcatgtcctgaatctcgcactgcgccaggggcctggccagctacagagagaggtcacacttcacctgaatcccatctcctcagtccacatccaccacaagtctgttgtgttcctgctcaactccccacaccccctggtgtggcatctgaagacagagagacttgccactggggtctccagactgtttttggtgtctgagggttctgtggtccagttttcatcagcaaacttctccttgacagcagaaacagaagaaaggaacttcccccatggaaatgaacatctgttaaattgggcccgaaaagagtatggagcagttacttcattcaccgaactcaagatagcaagaaacatttatattaaagtgggggaagatcaagtgttccctccaaagtgcaacatagggaagaattttctctcactcaattaccttgctgagtaccttcaacccaaagcagcagaagggtgtgtgatgtccagccagccccagaatgaggaagtacacatcatcgagctaatcacccccaactctaacccctacagtgctttccaggtggatataacaattgatataagaccttctcaagaggatcttgaagtggtcaaaaatctcatcctgatcttgaagtgcaaaaagtctgtcaactgggtgatcaaatcttttgatgttaagggaagcctgaaaattattgctcctaacagtattggctttggaaaagagagtgaaagatctatgacaatgaccaaatcaataagagatgacattccttcaacccaagggaatctggtgaagtgggctttggacaatggctatagtccaataacttcatacacaatggctcctgtggcaatagtatttcatcttcggcttgaaaataatgaggagatgggagatgaggaagtccacactattcctcctgagctacggatcctgctggaccctggtgccctgcctgccctgcagaacccgcccatccggggaggggaaggccaaaatggaggccttccgtttcctttcccagatatttccaggagagtctggaatgaagagggagaagatgggctccctcggccaaaggaccctgtcattcccagcatacaactgtttcctggtctcagagagccagaagaggtgcaagggagcgtggatattgccctgtctgtcaaatgtgacaatgagaagatgatcgtggctgtagaaaaagattcttttcaggccagtggctactcggggatggacgtcaccctgttggatcctacctgcaaggccaagatgaatggcacacactttgttttggagtctcctctgaatggctgcggtactcggccccggtggtcagcccttgatggtgtggtctactataactccattgtgatacaggttccagcccttggggacagtagtggttggccagatggttatgaagatctggagtcaggtgataatggatttccgggagatatggatgaaggagatgcttccctgttcacccgacctgaaatcgtggtgtttaattgcagccttcagcaggtgaggaaccccagcagcttccaggaacagccccacggaaacatcaccttcaacatggagctatacaacactgacctctttttggtgccctcccagggcgtcttctctgtgccagagaatggacacgtttatgttgaggtatctgttactaaggctgaacaagaactgggatttgccatccaaacgtgctttatctctccatattcgaaccctgataggatgtctcattacaccattattgagaatatttgtcctaaagatgaatctgtgaaattctacagtcccaagagagtgcacttccctatcccgcaagctgacatggataagaagcgattcagctttgtcttcaagcctgtcttcaacacctcactgctctttctacagtgtgagctgacgctgtgtacgaagatggagaagcacccccagaagttgcctaagtgtgtgcctcctgacgaagcctgcacctcgctggacgcctcgataatctgggccatgatgcagaataagaagacgttcaccaagccccttgctgtgatccaccatgaagcagaatctaaagaaaaaggtccaagcatgaaggaaccaaatccaatttctccaccaattttccatggtctggacaccctaaccgtgatgggcattgcgtttgcagcctttgtgatcggagcactcctgacgggggccttgtggtacatctattctcacacaggggagacagcaggaaggcagcaagtccccacctccccgccagcctcggaaaacagcagtgctgcccacagcatcggcagcacgcagagcacgccttgctccagcagcagcacggcctagcccaacccaggcccaacccggcccaacccagcccagcccagctcagctcagctactccaagggcaggaccaatggctgagcctcgtgtccagactcagagggctggattttggttcccttgtaaagacagagtgaatttcagtataaagatcacccgttgtattcaccccacacccagggctagtataaacatgaccctgggcttctgtaccacactagaattcatgtgagaaagctaaaatggtggtcttctccaccagcccctcacaggcttgggggttttctatgtgaaacacatgccagtttttaaaatgctgctttgtccaggtgagaacatccataatttggggccctgagttttacccagactcaaggagttggtaaagggttaatagccagatagtagaaccagtgaggagatgcggccaaagattctttatatctgaaccaagatgtaaaacaagaaatgctttgaggctttctaagcgatcctcctgtctaatttgcacctttgtctggatgcactcttctgaccttgctgccacaacctgtggggtctgatgtgtcccaagatgggtgctgccctcagggactgcaccctgacaagtgttaaggcaacattccttgcttgtgccctgggccaaaaccaatgctgatgaccttatcagcttcctgtttcttcccatactgcatacaccactgcaaaatgtcttaatgcaaattttgtatttcttacaggcctacagaaattgaaaatgaccaaaatcaggaaccacagatttgtgcccattcctaatattttgttctgcaaattaatgtataatttgaggtgaaattcagttataaagtcaaggacgaatttgcacagtgatatatttctatgtgtatgcaagtacaagtatataatatgtcacctggcacattcattttctcagttgaagaagagaaaatttgaaaatgtccttatgcttttagagttgcaacttaagtatatttggtagggtgagtgtttccactcaaaatatgtcaacttaaaaaaaaataggccctttcataaaaaccaaactgtagcaagatgcaaatgcatggcaaatctgtcggtctccagttggttatctgaatagtgtcaccaattccaccaagacagtgctgagattggaaagggcactcatttggattgccttacttctcttgccttaaatatatcccatatatttaatatgtcaaaaagggcttgaggtgaatttcattaaatggaataatatgatgccactttgcagctaaaataagctcagtgatacctccttgtt

SEQ ID NO: 1487 - DNA, 1040 bp; single-stranded, linear
  immediate source library: GENBANK
  immediate source clone: g829637
aacacatttcatctgggcttcttaaatctaaatctttaaaatgactaagttttcttccttttctctgtttttcctaatagttggggcttatatgactcatgtgtgtttcaatatggaaattattggagggaaagaagtgtcacctcattccaggccatttatggcctccatccagtatggcggacatcacgtttgtggaggtgttctgattgatccacagtgggtgctgacagcagcccactgccaatatcggtttaccaaaggccagtctcccactgtggttttaggcgcacactctctctcaaagaatgaggcctccaaacaaacactggagatcaaaaaatttataccattctcaagagttacatcagatcctcaatcaaatgatatcatgctggttaagcttcaaacagccgcaaaactcaataaacatgtcaagatgctccacataagatccaaaacctctcttagatctggaaccaaatgcaaggttactggctggggagccaccgatccagattcattaagaccttctgacaccctgcgagaagtcactgttactgtcctaagtcgaaaactttgcaacagccaaagttactacaacggcgacccttttatcaccaaagacatggtctgtgcaggagatgccaaaggccagaaggattcctgtaagggtgactcagggggccccttgatctgtaaaggtgtcttccacgctatagtctctggaggtcatgaatgtggtgttgccacaaagcctggaatctacaccctgttaaccaagaaataccagacttggatcaaaagcaaccttgtcccgcctcatacaaattaagttacaaataattttattggatgcacttgcttcttttttcctaatatgctcgcaggttagagttgggtgtaagtaaagcagagcacatatggggtccatttttgcacttgtaagtcattttattaaggaatcaagttctttttcacttgtatcactgatgtatttctaccatgctggttttattctaaataaaatttagaagact

SEQ ID NO: 1488 - DNA, 2921 bp; single-stranded, linear
  immediate source library: GENBANK
  immediate source clone: g840770
agcctgtggagacgggacagccctgtcccactcactctttcccctgccgctcctgccggcagctccaaccatgggaggccgcgtctttctcgcattctgtgtctggctgactctgccgggagctgaaacccaggactccaggggctgtgcccggtggtgccctcagaactcctcgtgtgtcaatgccaccgcctgtcgctgcaatccagggttcagctctttttctgagatcatcaccaccccgacggagacttgtgacgacatcaacgagtgtgcaacaccgtcgaaagtgtcatgcggaaaattctcggactgctggaacacagaggggagctacgactgcgtgtgcagcccgggatatgagcctgtttctggggcaaaaacattcaagaatgagagcgagaacacctgtcaagatgtggacgagtgcagctccgggcagcatcagtgtgacagctccaccgtctgcttcaacaccgtgggttcatacagctgccgctgccgcccaggctggaagcccagacacggaatcccgaataaccaaaaggacactgtctgtgaagatatgactttctccacctggaccccgccccctggagtccacagccagacgctttcccgattcttcgacaaagtccaggacctgggcagagactccaagacaagctcagccgaggtcaccatccagaatgtcatcaaattggtggatgaactgatggaagctcctggagacgtagaggccctggcgccacctgtccggcacctcatagccacccagctgctctcaaaccttgaagatatcatgaggatcctggccaagagcctgcctaaaggccccttcacctacatttccccttcgaacacagagctgaccctgatgatccaggagcggggggacaagaacgtcactatgggtcagagcagcgcacgcatgaagctgaattgggctgtggcagctggagccgaggatccaggccccgccgtggcgggcatcctctccatccagaacatgacgacattgctggccaatgcctccttgaacctgcattccaagaagcaagccgaactggaggagatatatgaaagcagcatccgtggtgtccaactcagacgcctctctgccgtcaactccatctttctgagccacaacaacaccaaggaactcaactcccccatccttttcgccttctcccaccttgagtcctccgatggggaggcgggaagagaccctcctgccaaggacgtgatgcctgggccacggcaggagctgctctgtgccttctggaagagtgacagcgacaggggagggcactgggccaccgaggtctgccaggtgctgggcagcaagaacggcagcaccacctgccaatgcagccacctgagcagctttacgatccttatggctcattatgacgtggaggactggaagctgaccctgatcaccagggtgggactggcgctgtcactcttctgcctgctgctgtgcatcctcactttcctgctggtgcggcccatccagggctcgcgcaccaccatacacctgcacctctgcatctgcctcttcgtgggctccaccatcttcctggccggcatcgagaacgaaggcggccaggtggggctgcgctgccgcctggtggccgggctgctgcactactgtttcctggccgccttctgctggatgagcctcgaaggcctggagctctactttcttgtggtgcgcgtgttccaaggccagggcctgagtacgcgctggctctgcctgatcggctatggcgtgcccctgctcatcgtgggcgtctcggctgccatctacagcaagggctacggccgccccagatactgctggttggactttgagcagggcttcctctggagcttcttgggacctgtgaccttcatcattttgtgcaatgctgtcattttcgtgactaccgtctggaagctcactcagaagttttctgaaatcaatccagacatgaagaaattaaagaaggcgagggcgctgaccatcacggccatcgcgcagctcttcctgttgggctgcacctgggtctttggcctgttcatcttcgacgatcggagcttggtgctgacctatgtgtttaccatcctcaactgcctgcagggcgccttcctctacctgctgcactgcctgctcaacaagaaggttcgggaagaataccggaagtgggcctgcctagttgctggggggagcaagtactcagaattcacctccaccacgtctggcactggccacaatcagacccgggccctcagggcatcagagtccggcatatgaaggcgcatggttctggacggcccagcagctcctgtggccacagcagctttgtacacgaagaccatccatcctcccttcgtccaccactctactccctccaccctccctccctgatcccgtgtgccaccaggagggagtggcagctatagtctggcaccaaagtccaggacacccagtggggtggagtcggagccactggtcctgctgctggctgcctctctgctccaccttgtgacccagggtggggacaggggctggcccagggctgcaatgcagcatgttgccctggcacctgtggccagtactcgggacagactaagggcgcttgtcccatcctggacttttcctctcatgtctttgctgcagaactgaagagactaggcgctggggctcagcttccctcttaagctaagactgatgtcagaggccccatggcgaggccccttggggccactgcctgaggctcacggtacagaggcctgccctgcctggccgggcaggaggttctcactgttgtgaaggttgtagacgttgtgtaatgtgtttttatctgttaaaatttttcagtgttgacacttaaaattaaacacatgcatacagaaaaaaaaaaaaaaaaaaaaaa

SEQ ID NO: 1489 - DNA, 1456 bp; single-stranded, linear
  immediate source library: GENBANK
  immediate source clone: g860989
gcggccgctcgacgctgtagtggcttcgtcttcggtttttctcttccttcgctaacgcctcccggctctcgtcagcctcccgccggccgtctccttaacaccgaacaccatgccttcaattaagttgcagagttctgatggagagatatttgaagttgatgtggaaattgccaaacaatctgtgactattaagaccatgttggaagatttgggaatggatgatgaaggagatgatgacccagttcctctaccaaatgtgaatgcagcaatattaaaaaaggtcattcagtggtgcacccaccacaaggatgaccctcctcctcctgaagatgatgagaacaaagaaaagcgaacagatgatatccctgtttgggaccaagaattcctgaaagttgaccaaggaacactttttgaactcattctggctgcaaactacttagacatcaaaggtttgcttgatgttacatgcaagactgttgccaatatgatcaaggggaaaactcctgaggagattcgcaagaccttcaatatcaaaaatgactttactgaagaggaggaagcccaggtacgcaaagagaaccagtggtgtgaagagaagtgaaatgttgtgcctgacactgtaacactgtaaggattgttccaaatactagttgcactgctctgtttataattgttaatattagacaaacagtagacaaatgcagcagcaagtcaattgtattagcagaatattgtcctcattgcatgtgtagttgtagctcgagtcccaaaccttacggccaagtttcttctagtatgatggaaagtttcttttttctttgctctgaataaaactgaactgtgggttctctataagtggcattttgggctttcctcccttttttgtaaagcaatgtctgcctagtttattgtccaagttaactttaggtgaccttttaaaagttggcattgaaaataaaacaacttgcaaaaaagttttctggaatagaattaacaaaatattatctttatcatgagttggaaactggaaaaaggcttcttgaagtaaatgttctgagtggagctactaggatgtcttccagcctcctgcagtcaaggagtaccactgtattgattagcctgtatgtagcagggctcccttcattgcatctgaggacttgttttctttttctttatttttaatcctcttagttttaaatatattgcctagagactcagttactacccagtttgtggttttttgggagaaatgtaactggacagttagcttttcaattaaaaagacacttaacccatgtgggatgtcatctttttataattagtgttcccatgtggagaaaattattcacactacttgcatgtaaagaataatttaacttttaacattaaaatatgtggtaaaacccagaaagcatccatcatgaatgcaagatactttcaataaagtaagttatat

SEQ ID NO: 1490 - DNA, 5633 bp; single-stranded, linear
  immediate source library: GENBANK
  immediate source clone: g862374
cccgagtgtcggttcactgtggagacagcggtggcggagtgggtctccagggctctgggctggcaaggcccccggaggggtggggcgcggaggaggctacagatccgcttccgcgcggcggggccgggtgcttgggacgcggctctgggctcccgggataaggggctcccgggacaaggggctcccggagagcccagtggttagcgatgctgctgtcgccgtcgctgctgctgctgctgctgctggggggcgccgcgggctgcgccgagggtgtggcggcggcgcttacccccgagcggctcctggagtggcaggataaaggaatatttgttatccaaagtgagagtctcaagaaatgcattcaagcaggtaaatcggttctgaccctcggtagaactggaagcaagcaagcaaacaagcacatgctgtggaaatgggtttcaaaccatggcctctttaacataggaggcagcggttgcctgggcctgaatttctccgccccagagcagccattaagcttatatgaatgtgactccaccctcgtttccttacggtggcgctgtaacaggaagatgatcacaggcccgctgcagtactctgtccaggtggcgcatgacaacacagtggtggcctcacggaagtatattcataagtggatttcttatgggtcaggtggtggagacatttgtgaatatctacacaaagatttgcatacaatcaaagggaacacccacgggatgccgtgtatgtttcccttccagtataaccatcagtggcatcatgaatgtacccgtgaaggtcgggaagatgacttactgtggtgtgccacgacaagccgttatgaaagagatgaaaagtggggattttgccctgatcccacctctgcagaagtaggttgtgatactatttgggagaaggacctcaattcacacatttgctaccagttcaacctgctttcatctctctcttggagtgaggcacattcttcatgccagatgcaaggaggtacgctgttaagtattacagatgaaactgaagaaaatttcataagggagcacatgagcagtaaaacagtggaggtgtgggttggcctcaatcagcttgatgaagacgctggctggcagtggtctgatggaacgccgctcaactatctgaattggagcccagaggtaaattttgagccatttgttgaagatcactgtggaacatttagttcatttatgccaagtgcctggaggagtcgggattgtgagtccaccttgccatatatatgtaaaaaatatctaaaccacattgatcatgaaatagttgaaaaagatgcgtggaaatattatgctacccactgtgagcctggctggaatccctacaatcgtaattgctacaaacttcagaaagaagaaaagacctggcatgaggctctgcgttcttgtcaggctgataacagtgcattaatagacataacctcattagcagaggtggagtttcttgtaaccctccttggagatgaaaatgcatcagaaacatggattggtttgagcagcaataaaattccagtttcctttgaatggtctaatgactcttcagtcatctttactaattggcacacacttgagccccacatttttccaaatagaagccagctgtgtgtctcagcagagcagtctgagggacactggaaagtcaaaaattgtgaagaaagacttttttacatttgtaaaaaagcaggccatgtcctctctgatgctgaatcaggatgtcaagagggatgggaggagacatgtggattctgttacaaaattgacacagtccttcgaagctttgaccaagcttccagcggttattactgtcctcctgcacttgtaaccattacaaacaggtttgaacaggcttttattaccagtttgatcagtagtgtggtaaaaatgaaggacagttatttttggatagctcttcaggaccaaaatgatacgggagaatacacttggaagccagtagggcagaaacccgagccggtgcagtacacacactggaacacacaccaaccgcgctacagtggtggctgtgttgccatgcgaggaaggcatccacttggtcgctgggaagtgaagcactgtcggcactttaaggcaatgtccttgtgcaagcagccagttgaaaatcaggaaaaagcagagtatgaagagagatggccctttcacccctgctatttggactgggagtcagagcctggtctggccagttgcttcaaggtatttcatagtgaaaaagttctgatgaaaagaacatggagagaagctgaagcattttgcgaagaatttggagctcatcttgcaagctttgcccatattgaggaagagaattttgtgaatgagctcttacacccaaaatttaattggacagaagaaaggcagttctggattggatttaataaaagaaacccactgaatgccggctcatgggagtggtctgatagaactcctgttgtctcttcgtttttagacaacacttattttggagaagatgcaagaaactgtgctgtttataagccaaacaaaacattgctgcccttacactgtggttccaaacgtgaatggatatgcaaaatcccaagagatgtgaaacccaagattccgttctggtaccagtacgatgtaccctggctcttttatcaggatgcagaatacctttttcatacctttgcctcagaatggttgaactttgagtttgtctgtagctggctgcacagtgatcttctcacaattcattctgcacatgagcaagaattcatccacagcaaaataaaagcgctatccaagtatggtgcaagttggtggattggacttcaagaagaaagagccaatgatgaatttcgctggagagatggaacaccagtgatataccagaactgggacacaggaagagaaagaactgtgaataatcagagccagagatgtggctttatttcttctataacaggactctggggtagtgaagagtgttcagtttctatgcctagtatctgtaagcgaaaaaaggtttggctcatagagaaaaagaaagatacaccaaaacaacatggaacgtgtcccaaaggatggctatattttaactataagtgccttctgctgaatatccccaaagacccaagcagttggaagaactggacgcatgcccaacatttctgtgctgaagaaggggggaccctggtcgccattgaaagtgaggtggagcaagctttcattactatgaatctttttggccagaccaccagtgtgtggataggtttacaaaatgatgattatgaaacatggctaaatggaaaacctgtggtatattctaactggtctccatttgatataataaatattccaagtcacaataccactgaagttcagaaacacattcctctctgtgccttactctcaagtaatcctaattttcatttcactggaaaatggtattttgaagactgtggaaaggaaggctatgggtttgtttgtgaaaaaatgcaagatacttctggacacggtgtaaatacatctgatatgtatccaatgcccaataccttagaatatggaaacagaacttacaaaataattaatgcaaatatgacttggtatgcagcaataaaaacctgcctgatgcacaaagcacaactggtcagcatcacagaccagtatcaccagtccttcctcactgttgtcctcaaccggctaggatatgcccactggattggactgttcaccacagataatggtcttaattttgactggtctgatggcaccaaatcttctttcactttttggaaagatgaggagtcctccctccttggtgactgcgtttttgccgacagcaacggacgctggcatagcacagcctgcgactcatttctgcaaggtgccatttgtcatgtaccacctgaaacaagacaatctgaacacccagagttgtgctcagaaacatctattccctggataaaatttaaaagtaattgctacaagttttctacagtcctagacagtatgagttttgaggctgctcatgaattttgcaaaaaggaaggttctaatcttttaacaatcaaggatgaggctgaaaatgcatttctcctagaagagctgtttgcttttggttcttctgtccagatggtttggttgaatgctcaatttgatggtaacaatgaaaccataaagtggtttgatggaactcccacagaccagtcaaactggggcattcggaagccagacacagactacttcaagccccatcattgtgttgccttgaggatccctgaaggattatggcagctatccccgtgtcaagaaaaaaaaggctttatatgtaaaatggaggcagatattcacactgcagaggcgctgccagaaaaaggaccaagtcacagcatcattcctcttgcggttgtactgacactgatagtcattgtggccatttgcacactttccttctgcatatacaagcataacggtggcttcttcaggagacttgcagggtttcggaatccttactatcctgcaaccaactttagtacagtatatttagaagaaaatattctcatttctgatcttgagaagagtgaccaataataatgaggtcagagaatgccacagacaccagggtaagtaaagaagactaaacaggagtctcatctgtctttccctttacagcacagatgccattagaatgtgaattgggtcactattttaattattcttgaagtgattactggttttgaatcttaaccaaatcagatgggttttgatttattcatttccctaaactgtgatccattcttaaaaggggtaaattatgcattggttatttttcagaaagacaagaactattaaaagaaactccctattgaaaactctgaaatcaatgcgaataatagtttttgcattaatgtatctctactaaaatttgggggaattttaaaactaatctggtatctattcagacatttacctgcactcgtaccattaagaaagacagaaagaagccaaaaaaaattaatcttgtatatgaggggaaaaggaaagggcttctgagaggattcttagttgtttcttttgaattccttttaatagcaggatttggaaaatactaatttctgtgcttaagggtcacaggttctgggctctcaactgatatttaaggtgacattcatttttattaggtctaacatctcaagctaaaggagaaagaaaaatacctccttttaaatggcaaagaccttcattagcagcacacttttataaacacccatatagttaaaatgtggccttaaactttcaattactaaatgatgattaagttggatattttaaaatgtcttatacataagcttaaagtaatatattgaaactttaacagttgtgctgtaaaaactcatggactttctgggattctaaatatattatataatatgttacactcttaataactggtagatataaaatgtaacttggatttaaaggagtagagctaaagatctgtattatagtctcattagtaccagacagatgttgttgagaagtactaaataaattagtaatctagatatccttattatgtaaatgagtttaggtgttctatttaataaactattttctgga

SEQ ID NO: 1491 - DNA, 1233 bp; single-stranded, linear
  immediate source library: GENBANK
  immediate source clone: g862620
ctaaagctctcttgctgcctagcctcctgccggcctcatcttcgcccagccaaccccgcctggagccctatggccaactgcgagttcagcccggtgtccggggacaaaccctgctgccggctctctaggagagcccaactctgtcttggcgtcagtatcctggtcctgatcctcgtcgtggtgctcgcggtggtcgtcccgaggtggcgccagacgtggagcggtccgggcaccaccaagcgctttcccgagaccgtcctggcgcgatgcgtcaagtacactgaaattcatcctgagatgagacatgtagactgccaaagtgtatgggatgctttcaagggtgcatttatttcaaaacatccttgcaacattactgaagaagactatcagccactaatgaagttgggaactcagaccgtaccttgcaacaagattcttctttggagcagaataaaagatctggcccatcagttcacacaggtccagcgggacatgttcaccctggaggacacgctgctaggctaccttgctgatgacctcacatggtgtggtgaattcaacacttccaaaataaactatcaatcttgcccagactggagaaaggactgcagcaacaaccctgtttcagtattctggaaaacggtttcccgcaggtttgcagaagctgcctgtgatgtggtccatgtgatgctcaatggatcccgcagtaaaatctttgacaaaaacagcacttttgggagtgtggaagtccataatttgcaaccagagaaggttcagacactagaggcctgggtgatacatggtggaagagaagattccagagacttatgccaggatcccaccataaaagagctggaatcgattataagcaaaaggaatattcaattttcctgcaagaatatctacagacctgacaagtttcttcagtgtgtgaaaaatcctgaggattcatcttgcacatctgagatctgagccagtcgctgtggttgttttagctccttgactccttgtggtttatgtcatcatacatgactcagcatacctgctggtgcagagctgaagattttggagggtcctccacaataaggtcaatgccagagacggaagcctttttccccaaagtcttaaaataacttatatcatcagcatacctttattgtgatctatcaatagtcaagaaaaattattgtataagattagaatgaaaattgtatgttaagttacttcctttag

SEQ ID NO: 1492 - DNA, 2096 bp; single-stranded, linear
  immediate source library: GENBANK
  immediate source clone: g862622
gaattcctctgaccaccatgccacctcctcgcctcctcttcttcctcctcttcctcacccccatggaagtcaggcccgaggaacctctagtggtgaaggtggaagagggagataacgctgtgctgcagtgcctcaaggggacctcagatggccccactcagcagctgacctggtctcgggagtccccgcttaaacccttcttaaaactcagcctggggctgccaggcctgggaatccacatgaggcccctggcatcctggcttttcatcttcaacgtctctcaacagatggggggcttctacctgtgccagccggggcccccctctgagaaggcctggcagcctggctggacagtcaatgtggagggcagcggggagctgttccggtggaatgtttcggacctaggtggcctgggctgtggcctgaagaacaggtcctcagagggccccagctccccttccgggaagctcatgagccccaagctgtatgtgtgggccaaagaccgccctgagatctgggagggagagcctccgtgtgtcccaccgagggacagcctgaaccagagcctcagccaggacctcaccatggcccctggctccacactctggctgtcctgtggggtaccccctgactctgtgtccaggggccccctctcctggacccatgtgcaccccaaggggcctaagtcattgctgagcctagagctgaaggacgatcgcccggccagagatatgtgggtaatggagacgggtctgttgttgccccgggccacagctcaagacgctggaaagtattattgtcaccgtggcaacctgaccatgtcattccacctggagatcactgctcggccagtactatggcactggctgctgaggactggtggctggaaggtctcagctgtgactttggcttatctgatcttctgcctgtgttcccttgtgggcattcttcatcttcaaagagccctggtcctgaggaggaaaagaaagcgaatgactgaccccaccaggagattcttcaaagtgacgcctcccccaggaagcgggccccagaaccagtacgggaacgtgctgtctctccccacacccacctcaggcctcggacgcgcccagcgttgggccgcaggcctggggggcactgccccgtcttatggaaacccgagcagcgacgtccaggcggatggagccttggggtcccggagcccgccgggagtgggcccagaagaagaggaaggggagggctatgaggaacctgacagtgaggaggactccgagttctatgagaacgactccaaccttgggcaggaccagctctcccaggatggcagcggctacgagaaccctgaggatgagcccctgggtcctgaggatgaagactccttctccaacgctgagtcttatgagaacgaggatgaagagctgacccagccggtcgccaggacaatggacttcctgagccctcatgggtcagcctgggaccccagccgggaagcaacctccctggggtcccagtcctatgaggatatgagaggaatcctgtatgcagccccccagctccactccattcggggccagcctggacccaatcatgaggaagatgcagactcttatgagaacatggataatcccgatgggccagacccagcctggggaggagggggccgcatgggcacctggagcaccaggtgatcctcaggtggccagcctggatctcctcaagtccccaagattcacacctgactctgaaatctgaagacctcgagcagatgatgccaacctctggagcaatgttgcttaggatgtgtgcatgtgtgtaagtgtgtgtgtgtgtgtgtgtgtgtgtgtgtgtgtatacatgccagtgacacttccagtcccctttgtattccttaaataaactcaatgagctcttccaatccaaaaatgttaaaattagccaggcatagttgtgtgtgcctacagtgctacaggaggctgaggcaagaggattgcttgagttaaggaaggaagtcaaggctgcagtgagctatggtcatgccactgcactccagcctgggcaacagcaagaccctgtgtccaaaaaaaaaaaaggaattc

SEQ ID NO: 1493 - DNA, 3410 bp; single-stranded, linear
  immediate source library: GENBANK
  immediate source clone: g881474
gtaccggttcggaattcccgggtcgacccacgcgtccggaaggctacagagagagccaggttttggtgccatgcacacagggaaacttagagttcagagagggggtgtgatttgcctgacctcacacagcaagttagagacccagctccacgactcattgtcttgctgcccagagctgctggctcccctgtttactctgagctgatcgatcaccttagcacacagctggctaggagagaaccatgcagtcacttcggccacacctgcccgttgacccttgctacctcggcaggctttgatcccttctgacctggaggccagaggctaggctgaggtcactcagcagacatcaaggacctgggcagatgggccggctgggatggtggcgagctgtacagataaaaagggacatgaaaatgaaaagcccgagcctgagttttcatcacggttccactcctgagtggtcttgggtgaatcacttcatctgccaaggcctggatttcctcatctgcaaactcagaaaactaaggctttggccctcgtcatcctgcccacccagcggggcttcccaacccaccacacagccatggacgggaaggtggcagtgcaagagcgtgggcctcctgcggtctcctgggtccccgaggagggagagaagttggaccaggaagacgaggaccaggtgaaggatcggggccaatggaccaacaagatggagtttgtgctgtcagtggccggggagatcattgggctgggcaatgtctggaggtttccctatctctgctacaaaaacggaggtggagccttcttcatcccctacttcatcttcttctttgtctgcggcatcccggtgttcttcctggaggtggcgttgggccaatacaccagccaagggagtgtcacagcctggaggaagatctgccccctcttccagggcattggtctggcatctgtggtcatcgagtcatatttgaatgtctactacatcatcatccttgcctgggctctcttctacctgttcagctccttcacttctgagctgccctggacgacctgcaacaacttttggaacacagagcattgcacggactttctgaaccactcaggagccggcacagtgaccccatttgagaattttacctcacctgtcatggaattctgggagagacgagttctgggcatcacctcgggcatccatgacctgggctccctgcgctgggagctggccctgtgcctcctgctcgcctgggtcatctgctatttctgcatctggaagggggtcaagtccacaggcaaggtggtttatttcacagccacgtttccgtacctgatgcttgtcattttgctgatcagaggtgtcacccttcccggagcctaccagggcatcatctactacttgaagccagatttgttccgcctcaaggaccctcaggtgtggatggatgcgggcacccagatcttcttctcctttgccatctgccaggggtgcctgacagccctgggcagctacaacaagtatcacaacaactgctacaaggactgcatcgccctctgcttcctgaacagtgccaccagctttgtggctgggtttgttgtcttctccatcctgggcttcatgtcccaagagcaaggggtgcccatttctgaagtggccgagtcaggtcctgggctggccttcatcgccttccccaaggctgtgactatgatgcccttatcccagctgtggtcctgcctgttctttatcatgctcatattcctagggctggacagccagtttgtctgtgtggagtgcctggtgacagcctccatagacatgttccccaggcagctccggaagagcgggcggcgcgagctcctcatcctcaccatcgccgtcatgtgctacctgatagggcttttcctggtcaccgagggcgggatgtacatcttccagctgtttgactactatgcttccagtggcatatgcctgctgttcctgtcattgtttgaagtggtctgcataagctgggtgtatggggcggaccgtttctatgacaacattgaggacatgattggctaccggccatggcccctggtgaagatctcctggctcttcctgacccctggactttgcctggccactttcctcttctccttgagcaagtacacccccctcaagtacaacaacgtctatgtgtacccgccctggggatactccattggctggttcctggctctgtcctccatggtctgtgtcccactcttcgtcgtcatcaccctcctgaagactcggggtcctttcaggaagcgtctgcgtcacgtcatcacccctgactccagtctgccacagcccaagcaacatccctgcttggatggcagtgctggccggaactttgggccctccccaacaagggaaggactgatagccggggagaaggagacccatttgtagggtgtggccagagcgaggcggctcctaagccgggaacctaggtcagggccaccctccattctcagcggacagcctctgcctctgtctcctgccacaatcctgctgggaactctggagagccacaggcacccccagctggaggccagactcctctcttgtgctagctggagcagctccttcccctttgctgataacaccaccactgggacgtgccatgttgggacgccactccctgtggaaggcaccatcgtttttataaaggggggtctttttggaggccgccatctgattgcaacacctcgagttatgaggattccactgtggggatgcctcttgttagagcgtactgcatttgtacacggggagaggagctataattggaacgcacactgccgtccaatgtggagagcctgatgggacaataccctgttggaagtgacaactgaacacactgtgttggatcggaggttccgttaggggatccttccttaggcttaacgacagaggcaagcctttgcatgccgtcagtctggagtttcctccgagtctctcatggcatctccagctcctgccctagttccgcactgttcttgcagtgtttcatcaactcctggagcattggaatggaaggggcttgggagatgattcctagacttcacaaacactcggcatgcctccctgcactgtccgttcctctgcccaaggccgatattgctaactgatcacagattctttcccacctcacaatcctccgaatgtgctccaggcgacaccatttgccatcctgcttctaacgcaaacccctgacttcatggatgaggaacctggagaccaaagagacaaagggactttttcaagttcacatggggacccccttcttgggggccagagatatgactaaaaccttatctccttgtgctcaggccagtgtcttcccattaaccccctgccttagttaacaagtgtgtatggattgcca

SEQ ID NO: 1494 - DNA, 1545 bp; single-stranded, linear
  immediate source library: GENBANK
  immediate source clone: g882253
ccgagggcggggccgggcccgggagcctgtggcttcaggaagaggagggcaaggtgtctggctgcgcgtttggctgcaatgagctcggcctcggggctccgcagggggcacccggcaggtggggaagaaaacatgacagaaacagatgccttctataaaagagaaatgtttgatccggcagaaaagtacaaaatggaccacaggaggagaggaattgctttaatcttcaatcatgagaggttcttttggcacttaacactgccagaaaggcggcgcacctgcgcagatagagacaatcttacccgcaggttttcagatctaggatttgaagtgaaatgctttaatgatcttaaagcagaagaactactgctcaaaattcatgaggtgtcaactgttagccacgcagatgccgattgctttgtgtgtgtcttcctgagccatggcgaaggcaatcacatttatgcatatgatgctaaaatcgaaattcagacattaactggcttgttcaaaggagacaagtgtcacagcctggttggaaaacccaagatatttatcatccaggcatgtcggggaaaccagcacgatgtgccagtcattcctttggatgtagtagataatcagacagagaagttggacaccaacataactgaggtggatgcagcctccgtttacacgctgcctgctggagctgacttcctcatgtgttactctgttgcagaaggatattattctcaccgggaaactgtgaacggctcatggtacattcaagatttgtgtgagatgttgggaaaatatggctcctccttagagttcacagaactcctcacactggtgaacaggaaagtttctcagcgccgagtggacttttgcaaagacccaagtgcaattggaaagaagcaggttccctgttttgcctcaatgctaactaaaaagctgcatttctttccaaaatctaattaattaatagaggctatctaatttcacactctgtattgaaaatggctttctcagccaggcgtggttactcacacctgtaatcccagcactttgggagtccaaggtgggcggatcacctgaggtcgggagttcgagaccagcctgaccaacatggcagaagccccgcctctactaaaaatgcaaaaaaaaatttagctaggcatggcggcgcatgcctgcaatcccagctacttggaaggctgaggcaggagaatcacttgaacccaggaggtggaggctgcggtgagccgagcattgcgccattgcactccagcctgggcaacgagtgaaactccgtctcaaaaaaaaagaaaatgtctttctcttccttttatataaatatcgttagggtgaagcattatggtctaatgattcaaatgttttaaagtttaatgcctagcagagaactgccttaaaaaaaaaaagttcatgttggccatggtgaaagggtttgatatggagaaacaaaatcctcaggaaattagataaataaaaatttataagcatttgtattattttttaataaactgcagggttacacaaaaatct

SEQ ID NO: 1495 - DNA, 1263 bp; single-stranded, linear
  immediate source library: GENBANK
  immediate source clone: g886049
ctctgaggctctttccaacgctgtaaaaaaggacagaggctgttccctatggcagaaggcaaccacagaaaaaagccacttaaggtgttggaatccctgggcaaagatttcctcactggtgttttggataacttggtggaacaaaatgtactgaactggaaggaagaggaaaaaaagaaatattacgatgctaaaactgaagacaaagttcgggtcatggcagactctatgcaagagaagcaacgtatggcaggacaaatgcttcttcaaaccttttttaacatagaccaaatatcccccaataaaaaagctcatccgaatatggaggctggaccacctgagtcaggagaatctacagatgccctcaagctttgtcctcatgaagaattcctgagactatgtaaagaaagagctgaagagatctatccaataaaggagagaaacaaccgcacacgcctggctctcatcatatgcaatacagagtttgaccatctgcctccgaggaatggagctgactttgacatcacagggatgaaggagctacttgagggtctggactatagtgtagatgtagaagagaatctgacagccagggatatggagtcagcgctgagggcatttgctaccagaccagagcacaagtcctctgacagcacattcttggtactcatgtctcatggcatcctggagggaatctgcggaactgtgcatgatgagaaaaaaccagatgtgctgctttatgacaccatcttccagatattcaacaaccgcaactgcctcagtctgaaggacaaacccaaggtcatcattgtccaggcctgcagaggtgcaaaccgtggggaactgtgggtcagagactctccagcatccttggaagtggcctcttcacagtcatctgagaacctggaggaagatgctgtttacaagacccacgtggagaaggacttcattgctttctgctcttcaacgccacacaacgtgtcctggagagacagcacaatgggctctatcttcatcacacaactcatcacatgcttccagaaatattcttggtgctgccacctagaggaagtatttcggaaggtacagcaatcatttgaaactccaagggccaaagctcaaatgcccaccatagaacgactgtccatgacaagatatttctacctctttcctggcaattgaaaatggaagccacaagcagcccagccctccttaatcaacttcaaggagcaccttcattagtacagcttgcatatttaacat

SEQ ID NO: 1496 - DNA, 2539 bp; single-stranded, linear
  immediate source library: GENBANK
  immediate source clone: g886257
cgggacgacgccccctcctgcggcgtggactccgtcagtggcccaccaagaaggaggaggaatatggaatccaagggggccagttcctgccgtctgctcttctgcctcttgatctccgccaccgtcttcaggccaggccttggatggtatactgtaaattcagcatatggagataccattatcataccttgccgacttgacgtacctcagaatctcatgtttggcaaatggaaatatgaaaagcccgatggctccccagtatttattgccttcagatcctctacaaagaaaagtgtgcagtacgacgatgtaccagaatacaaagacagattgaacctctcagaaaactacactttgtctatcagtaatgcaaggatcagtgatgaaaagagatttgtgtgcatgctagtaactgaggacaacgtgtttgaggcacctacaatagtcaaggtgttcaagcaaccatctaaacctgaaattgtaagcaaagcactgtttctcgaaacagagcagctaaaaaagttgggtgactgcatttcagaagacagttatccagatggcaatatcacatggtacaggaatggaaaagtgctacatccccttgaaggagcggtggtcataatttttaaaaaggaaatggacccagtgactcagctctataccatgacttccaccctggagtacaagacaaccaaggctgacatacaaatgccattcacctgctcggtgacatattatggaccatctggccagaaaacaattcattctgaacaggcagtatttgatatttactatcctacagagcaggtgacaatacaagtgctgccaccaaaaaatgccatcaaagaaggggataacatcactcttaaatgcttagggaatggcaaccctcccccagaggaatttttgttttacttaccaggacagcccgaaggaataagaagctcaaatacttacacactgatggatgtgaggcgcaatgcaacaggagactacaagtgttccctgatagacaaaaaaagcatgattgcttcaacagccatcacagttcactatttggatttgtccttaaacccaagtggagaagtgactagacagattggtgatgccctacccgtgtcatgcacaatatctgctagcaggaatgcaactgtggtatggatgaaagataacatcaggcttcgatctagcccgtcattttctagtcttcattatcaggatgctggaaactatgtctgcgaaactgctctgcaggaggttgaaggactaaagaaaagagagtcattgactctcattgtagaaggcaaacctcaaataaaaatgacaaagaaaactgatcccagtggactatctaaaacaataatctgccatgtggaaggttttccaaagccagccattcagtggacaattactggcagtggaagcgtcataaaccaaacagaggaatctccttatattaatggcaggtattatagtaaaattatcatttcccctgaagagaatgttacattaacttgcacagcagaaaaccaactggagagaacagtaaactccttgaatgtctctgctataagtattccagaacacgatgaggcagacgagataagtgatgaaaacagagaaaaggtgaatgaccaggcaaaactaattgtgggaatcgttgttggtctcctccttgctgcccttgttgctggtgtcgtctactggctgtacatgaagaagtcaaagactgcatcaaaacatgtaaacaaggacctcggtaatatggaagaaaacaaaaagttagaagaaaacaatcacaaaactgaagcctaagagagaaactgtcctagttgtccagagataaaaatcatatagaccaattgaagcatgaacgtggattgtatttaagacataaacaaagacattgacagcaattcatggttcaagtattaagcagttcattctaccaagctgtcacaggttttcagagaattatctcaagtaaaacaaatgaaatttaattacaaacaataagaacaagttttggcagccatgataataggtcatatgttgtgtttggttcaattttttttccgtaaatgtctgcactgaggatttctttttggtttgccttttatgtaaattttttacgtagctatttttatacactgtaagctttgttctgggagttgctgttaatctgatgtataatgtaatgtttttatttcaattgtttatatggataatctgagcaggtacatttctgattctgattgctatcagcaatgccccaaactttctcataagcacctaaaacccaaaggtggcagcttgtgaagattggggacactcatattgccctaattaaaaactgtgatttttatcacaagggaggggaggccgagagtcagactgatagacaccataggagccgactctttgatatgccaccagcgaactctcagaaataaatcacagatgcatatagacacacatacataatggtactcccaaactgacaattttacctattctgaaaaagacataaaacagaatt

SEQ ID NO: 1497 - DNA, 1670 bp; single-stranded, linear
  immediate source library: GENBANK
  immediate source clone: g895928
attgagagtggctctaacaagtgccatttttccttgttagctttcatttctcagccctttacaagattaaaatagtctgcagtttaatctctccaaagctttacggacagtgattctgtcctaaacaagacagtgactccaggatttctgaagactattgtggaagaagcatccattaaggccaagctataacatcagaaatggtgaatgaatacaagaaaattcttttgctgaaaggatttgagctcatggatgattatcattttacatcaattaagtccttactggcctatgatttaggactaactacaaaaatgcaagaggaatacaacagaattaagattacagatttgatggaaaaaaagttccaaggcgttgcctgtctagacaaactaatagaacttgccaaagatatgccatcacttaaaaaccttgttaacaatcttcgaaaagagaagtcaaaagttgctaagaaaattaaaacacaagaaaaagctccagtgaaaaaaataaaccaggaagaagtgggtcttgcggcacctgcacccaccgcaagaaacaaactgacatcggaagcaagagggaggattcctgtagctcagaaaagaaaaactccaaacaaagaaaagactgaagccaaaaggaataaggtgtcccaagagcagagtaagcccccaggtccctcaggagccagcacatctgcagctgtggatcatcccccactaccccagacctcatcatcaactccatccaacacttcgtttactccgaatcaggaaacccaggcccaacggcaggtggatgcaagaagaaatgttccccaaaacgacccagtgacagtggtggtactgaaagcaacagcgccatttaaatacgagtccccagaaaatgggaaaagcacaatgtttcatgctacagtggccagtaagactcaatatttccatgtgaaagtcttcgacatcaacttgaaagagaaatttgtaaggaagaaggtcattaccatatctgattactctgaatgtaaaggagtaatggaaataaaggaagcatcatctgtgtctgactttaatcaaaattttgaggtcccaaacagaattatcgaaatagcaaataaaactcccaagatcagtcaactttacaagcaagcatctggaacaatggtgtatgggttgtttatgttacaaaagaaaagcgtacacaagaagaacacaatttatgaaatacaggataatacaggatccatggatgtagtggggagtggaaaatggcacaatatcaagtgtgagaaaggagataaacttcgactcttctgccttcaactgagaacagttgaccgcaagctgaaactggtgtgtggaagtcacagcttcatcaaggtcatcaaggccaagaaaaacaaggaaggaccaatgaatgttaattgaaatatgaaagctgaaatgcaacaaacaacttccgcttaaaacaattaagttgttaataactgtgattttgtaaatttcagtaattcatttaaatgatgtttcagtagatatattctagcatattaagagcttttataactgagttatagattagtttgctttctggaataaaattttcttcttatactcttccttttttttagatattacattttgcttttatgacattcacgaggcaaaaaaccg

SEQ ID NO: 1498 - DNA, 1593 bp; single-stranded, linear
  immediate source library: GENBANK
  immediate source clone: g897904
cgcgtgggcgtgcctgtctgctccggcagcaccatgtcgctcttgttcgtcagcatggcgtgtgttgggttcttcttgctgcagggggcctggccacatgagggagtccacagaaaaccttccctcctggcccacccaggtcccctggtgaaatcagaagagacagtcatcctgcaatgttggtcagatgtcatgtttgaacacttccttctgcacagagaggggatgtttaacgacactttgcgcctcattggagaacaccatgatggggtctccaaggccaacttctccatcagtcgcatgacgcaagacctggcagggacctacagatgctacggttctgttactcactccccctatcaggtgtcagctcccagtgaccctctggacatcgtgatcataggtctatatgagaaaccttctctctcagcccagccgggccccacggttctggcaggagagaatgtgaccttgtcctgcagctcccggagctcctatgacatgtaccatctatccagggaaggggaggcccatgaacgtaggctccctgcagggcccaaggtcaacggaacattccaggctgactttcctctgggccctgccacccacggagggacctacagatgcttcggctctttccatgactctccatacgagtggtcaaagtcaagtgacccactgcttgtttctgtcacaggaaacccttcaaatagttggccttcacccactgaaccaagctccaaaaccggtaacccccgacacctgcacattctgattgggacctcagtggtcatcatcctcttcatcctcctcttctttctccttcatcgctggtgctccaacaaaaaaaatgctgcggtaatggaccaagagtctgcaggaaacagaacagcgaatagcgaggactctgatgaacaagaccctcaggaggtgacatacacacagttgaatcactgcgttttcacacagagaaaaatcactcgcccttctcagaggcccaagacacccccaacagatatcatcgtgtacacggaacttccaaatgctgagtccagatccaaagttgtctcctgcccatgagcaccacagtcaggccttgagggcgtcttctagggagacaacagccctgtctcaaaaccgggttgccagctcccatgtaccagcagctggaatctgaaggcatgagtctgcatcttagggcatcgatcttcctcacaccacaaatctgaatgtgcctctcacttgcttacaaatgtctaaggtccccactgcctgctggagaaaaaacacactcctttgcttagcccacagttctccatttcacttgacccctgcccacctctccaacctaactggcttacttcctagtctacttgaggctgcaatcacactgaggaactcacaattccaaacatacaagaggctccctcttaacgcagcacttagacacgtgttgttccaccttccctcatgctgttccacctcccctcagactagctttcagtcttctgtcagcagtaaaacttatatattttttaaaataacttcaatgtagttttccatccttcaaataaacatgtctgcccccatggt

SEQ ID NO: 1499 - DNA, 547 bp; single-stranded, linear
  immediate source library: GENBANK
  immediate source clone: g902001
gcgggacctcagccatgagacttctcatcctggccctccttggcatctgctctctcactgcatacattgtggaaggtgtagggagtgaagtctcagataagaggacctgtgtgagcctcactacccagcgactgccggttagcagaatcaagacctacaccatcacggaaggctccttgagagcagtaatttttattaccaaacgtggcctaaaagtctgtgctgatccacaagccacgtgggtgagagacgtggtcaggagcatggacaggaaatccaacaccagaaataacatgatccagaccaagccaacaggaacccagcaatcgaccaatacagctgtgaccctgactggctagtagtctctggcaccctgtccgtctccagccagccagctcatttcactttacaccctcatggactgagtttatactcaccttttatgaaagcactgcatgaataaaattattcctttgtatttttacttttaaatgtcttctgtattcacttatatgttctaattaataaattatttattattaagaat

SEQ ID NO: 1500 - DNA, 1034 bp; single-stranded, linear
  immediate source library: GENBANK
  immediate source clone: g913405
ctggctcggcggctgggccgcgggccgtgtgcggctctgctcctcctgggcctggggctgagcaccgtgacggggctccactgtgtcggggacacctaccccagcaacgaccggtgctgccacgagtgcaggccaggcaacgggatggtgagccgctgcagccgctcccagaacacggtgtgccgtccgtgcgggccgggcttctacaacgacgtggtcagctccaagccgtgcaagccctgcacgtggtgtaacctcagaagtgggagtgagcggaagcagctgtgcacggccacacaggacacagtctgccgctgccgggcgggcacccagcccctggacagctacaagcctggagttgactgtgccccctgccctccagggcacttctccccaggcgacaaccaggcctgcaagccctggaccaactgcaccttggctgggaagcacaccctgcagccggccagcaatagctcggacgcaatctgtgaggacagggaccccccagccacgcagccccaggagacccagggccccccggccaggcccatcactgtccagcccactgaagcctggcccagaacctcacagggaccctccacccggcccgtggaggtccccgggggccgtgcggttgccgccatcctgggcctgggcctggtgctggggctgctgggccccctggccatcctgctggccctgtacctgctccggagggaccagaggctgccccccgatgcccacaagccccctgggggaggcagtttccggacccccatccaagaggagcaggccgacgcccactccaccctggccaagatctgacctgggcccaccaaggtggacgctgggccccgccaggctggagcccggagggtctgctgggcgagcagggcaggtgcaggccgcctgccccgccacgctcctgggccaactctgcaccgttctaggtgccgatggctgcctccggctctctgcttacgtatgccatgcatacctcctgcgccgcgggaccacaattaaaaccttggcag

SEQ ID NO: 1501 - DNA, 241 bp; single-stranded, linear
  immediate source library: GENBANK
  immediate source clone: g961439
tgcccttgctgtcctcctctgcaccatggctctctgcaaccagttctctgcatcacttgctgctgacacgccgaccgcctgctgcttcagctacacctcccggcagattccacagaatttcatggctgactactttgagacgagcagccagtgctccaagcccagtgtcatcttcctaaccaagagaggccggcaggtctgtgctgaccccagtgaggagtgggtccagaaatacgtcagt

SEQ ID NO: 1502 - DNA, 3757 bp; single-stranded, linear
  immediate source library: GENBANK
  immediate source clone: g975297
catcaccagcaacaacaacaaaaaaaaatcctcatcaaatcctcacctaagctttcagtgtatccagatccacatcttcactcaagccaggagagggaaagaggaaaggggggcaggaaaaaaaaaaaacccaacaacttagcggaaacttctcagagaatgctccaaaactcagcagtgcttctggtgctggtgatcagtgcttctgcaacccatgaggcggagcagaatgactctgtgagccccaggaaatcccgagtggcggctcaaaactcagctgaagtggttcgttgcctcaacagtgctctacaggtcggctgcggggcttttgcatgcctggaaaactccacctgtgacacagatgggatgtatgacatctgtaaatccttcttgtacagcgctgctaaatttgacactcagggaaaagcattcgtcaaagagagcttaaaatgcatcgccaacggggtcacctccaaggtcttcctcgccattcggaggtgctccactttccaaaggatgattgctgaggtgcaggaagagtgctacagcaagctgaatgtgtgcagcatcgccaagcggaaccctgaagccatcactgaggtcgtccagctgcccaatcacttctccaacagatactataacagacttgtccgaagcctgctggaatgtgatgaagacacagtcagcacaatcagagacagcctgatggagaaaattgggcctaacatggccagcctcttccacatcctgcagacagaccactgtgcccaaacacacccacgagctgacttcaacaggagacgcaccaatgagccgcagaagctgaaagtcctcctcaggaacctccgaggtgaggaggactctccctcccacatcaaacgcacatcccatgagagtgcataaccagggagaggttattcacaacctcaccaaactagtatcattttaggggtgttgacacaccaattttgagtgtactgtgcctggtttgatttttttaaagtagttcctattttctatcccccttaaagaaaattgcatgaaactaggcttctgtaatcaatatcccaacattctgcaatggcagcattcccaccaacaaaatccatgtgatcattctgcctctcctcaggagaaagtaccctcttttaccaacttcctctgccatgtcttttcccctgctcccctgagaccacccccaaacacaaaacattcatgtaactctccagccattgtaatttgaagatgtggatccctttagaacggttgccccagtagagttagctgataaggaaactttatttaaatgcatgtcttaaatgctcataaagatgttaaatggaattcgtgttatgaatctgtgctggccatggacgaatatgaatgtcacatttgaattcttgatctctaatgagctagtgtcttatggtcttgatcctccaatgtctaattttctttccgacacatttaccaaattgcttgagcctggctgtccaaccagactttgagcctgcatcttcttgcatctaatgaaaaacaaaaagctaacatctttacgtactgtaactgctcagagctttaaaagtatctttaacaattgtcttaaaaccagagaatcttaaggtctaactgtggaatataaatagctgaaaactaatgtactgtacataaattccagaggactctgcttaaacaaagcagtatataataactttattgcatatagatttagttttgtaacttagctttatttttcttttcctgggaatggaataactatctcacttccagatatccacataaatgctccttgtggccttttttataactaagggggtagaagtagttttaattcaacatcaaaacttaagatgggcctgtatgagacaggaaaaaccaacaggtttatctgaaggaccccaggtaagatgttaatctcccagcccacctcaacccagaggctactcttgacttagacctatactgaaagatctctgtcacatccaactggaaattccaggaaccaaaaagagcatccctatgggcttggaccacttacagtgtgataaggcctactatacattaggaagtggtagttctttactcgtcccctttcatcggtgcctggtactctggcaaatgatgatggggtgggagactttccattaaatcaatcaggaatgagtcaatcagcctttaggtctttagtccgggggacttggggctgagagagtataaataaccctgggctgtccagccttaatagacttctcttacattttcgtcctgtagcacgctgcctgccaaagtagtcctggcagctggaccatctctgtaggatcgtaaaaaaatagaaaaaaagaaaaaaaaaagaaagaaagagggaaaaagagctggtggtttgatcatttctgccatgatgtttacaagatggcgaccaccaaagtcaaacgactaacctatctatgaacaacagtagtttctcagggtcactgtccttgaacccaacagtcccttatgagcgtcactgcccaccaaaggtcaatgtcaagagaggaagagagggaggaggggtaggactgcaggggccactccaaactcgcttaggtagaaactattggtgctcgactctcactaggctaaactcaagatttgaccaaatcgagtgatagggatcctggtgggaggagagagggcacatctccagaaaaatgaaaagcaatacaactttaccataaagcctttaaaaccagtaacgtgctgctcaaggaccaagagcaattgcagcagacccagcagcagcagcagcagcacaaacattgctgcctttgtccccacacagcctctaagcgtgctgacatcagattgttaagggcatttttatactcagaactgtcccatccccaggtccccaaacttatggacactgccttagcctcttggaaatcaggtagaccatattctaagttagactcttcccctccctcccacacttcccacccccaggcaaggctgacttctctgaatcagaaaagctattaaagtttgtgtgttgtgtccattttgcaaacccaactaagccaggaccccaatgcgacaagtagttcatgagtattcctagcaaatttctctctttcttcagttcagtagatttccttttttcttttcttttttttttttttttttttttggctgtgacctcttcaaaccgtggtacccccccttttctccccacgatgatatctatatatgtatctacaatacatatatctacacatacagaaagaagcagttctcacatgttgctagttttttgcttctctttcccccaccctactccctccaattccccccttaaacttccaaagcttcgtcttgtgtttgctgcagagtgattcgggggctgacctagaccagtttgcatgattcttctcttgtgatttggttgcactttagacatttttgtgccattatatttgcattatgtatttataatttaaatgatatttaggtttttggctgagtactggaataaacagtgagcatatctggtatatgtcattatttattgttaaattacattttttaagctccatgtgcatataaaggttatgaaacatatcatggtaatgacagatgcaagttattttatttgcttattttttataattaaagatgccatagcataatatgaagcctttggtgaattccttctaagataaaaataataataaagtgttacgttttattggtttca

SEQ ID NO: 1503 - DNA, 626 bp; single-stranded, linear
  immediate source library: GENBANK
  immediate source clone: g984723
gccggagctgggcgcggattcgccgaggcaccgaggcactcagaggaggcgccatgtcagaaccggctggggatgtccgtcagaacccatgcggcagcaaggcctgccgccgcctcttcggcccagtggacagcgagcagctgagacgcgactgtgatgcgctaatggcgggctgcatccaggaggcccgtgagcgatggaacttcgactttgtcaccgagacaccactggagggtgacttcgcctgggagcgtgtgcggggccttggcctgcccaagctctaccttcccacggggccccggcgaggccgggatgagttgggaggaggcaggcggcctggcacctcacctgctctgctgcaggggacagcagaggaagaccatgtggacctgtcactgtcttgtacccttgtgcctcgctcaggggagcaggctgaagggtccccaggtggacctggagactctcagggtcgaaaacggcggcagaccagcatgacagatttctaccactccaaacgccggctgatcttctccaagaggaagccctaatccgcccacaggaagcctgcagtcctggaagcgcgagggcctcaaaggcccgctctacatcttctgccttagtctcag

SEQ ID NO: 1504 - DNA, 1789 bp; single-stranded, linear
  immediate source library: GENBANK
  immediate source clone: g984968
ggttcaggaacctgctggttctgatacataaatcagacagcctctgctgcatgacacgaagcttgcttctgcctggcatctgtgagcagctgccaggctccggccaggatcccttccttctcctcattggctgatggatcccaaggggctcctctccttgaccttcgtgctgtttctctccctggcttttggggcaagctacggaacaggtgggcgcatgatgaactgcccaaagattctccggcagttgggaagcaaagtgctgctgcccctgacatatgaaaggataaataagagcatgaacaaaagcatccacattgtcgtcacaatggcaaaatcactggagaacagtgtcgagaacaaaatagtgtctcttgatccatccgaagcaggccctccacgttatctaggagatcgctacaagttttatctggagaatctcaccctggggatacgggaaagcaggaaggaggatgagggatggtaccttatgaccctggagaaaaatgtttcagttcagcgcttttgcctgcagttgaggctttatgagcaggtctccactccagaaattaaagttttaaacaagacccaggagaacgggacctgcaccttgatactgggctgcacagtggagaagggggaccatgtggcttacagctggagtgaaaaggcgggcacccacccactgaacccagccaacagctcccacctcctgtccctcaccctcggcccccagcatgctgacaatatctacatctgcaccgtgagcaaccctatcagcaacaattcccagaccttcagcccgtggcccggatgcaggacagacccctcagaaacaaaaccatgggcagtgtatgctgggctgttagggggtgtcatcatgattctcatcatggtggtaatactacagttgagaagaagaggtaaaacgaaccattaccagacaacagtggaaaaaaaaagccttacgatctatgcccaagtccagaaaccaggtcctcttcagaagaaacttgactccttcccagctcaggacccttgcaccaccatatatgttgctgccacagagcctgtcccagagtctgtccaggaaacaaattccatcacagtctatgctagtgtgacacttccagagagctgacaccagagaccaacaaagggactttctgaaggaaaatggaaaaaccaaaatgaacactgaacttggccacaggcccaagtttcctctggcagacatgctgcacgtctgtacccttctcagatcaactccctggtgatgtttcttccacatacatctgtgaaatgaacaaggaagtgaggcttcccaagaatttagcttgctgtgcagtggctgcaggcgcagaacagagcgttacttgataacagcgttccatctttgtgttgtagcagatgaaatggacagtaatgtgagttcagactttgggcatcttgctcttggctggaactgataataaaaatcagactgaaagccaggacatctgagtacctatctcacacactgaccaccagtcacaaagtctggaaaagtttacattttggctatctttactttgttctgggagctgatcatgataacctgcagacctgatcaagcctctgtgcctcagtttctctctcaggataaagagtgaatagaggccgaagggtgaatttcttattatacataaaacactctgatattattgtataaaggaagctaagaatattattttatttgcaaaacccagaagctaaaaagtcaataaacagaaagaatgattttgagaaa

SEQ ID NO: 1505 - DNA, 1600 bp; single-stranded, linear
  immediate source library: GENBANK
  immediate source clone: g995825
gaattccgggctgtagagcttgcccgcgcagtggggatggaacgttgctaggcttagcgggtctggctgctggaggcccgagcagcacgctcgagccgacgcgcgccaaagcgggaatctggaaggcgaagcagctctgcaagtttaatgcacgtatttaaaactcccgggcctgcggacgctatgcacaggaagcacctccaggagattccagacctgagtagcaacgttgccaccagcttcacgtggggatgggattccagcaagacttctgaactgctgtcaggcatgggggtctccgccctggagaaagaggagcccgacagtgagaacatcccccaggaactgctctcaaacctgggccacccggagagccccccacggaaacggctgaagagcaaagggagtgacaaagactttgtaattgtccgcaggcctaagctaaatcgggagaactttccaggtgtttcatgggactctcttccggatgagctgctcttgggaatcttttcctgtctgtgcctccctgagctgctaaaggtctctggtgtttgtaagaggtggtatcgcctagcgtctgatgagtctctatggcagaccttagaccttacaggtaaaaatctgcacccggatgtgactggtcggttgctgtctcaaggggtgattgccttccgctgcccacgatcatttatggaccaaccattggctgaacatttcagcccttttcgtgtacaggacatggacctatcgaactcagttatagaagtgtccaccctccacggcatactgtctcagtgttccaagttgcagaatctaagcctggaactgcggctttcggatcccattgtcaatactctcgcaaaaaactcaaatttagtgcgacttaaccttcctgggtgtcctggattccctaaatttcccctgcagactttcctaagcagctgtcccagactggatgagctgaacctctcctggtgttttaatttcactgaaaagcatgtacaggtggctgttgcgcatgtctcagagaccatgacccagctgaatctaagcggctacagaaagaatctccagaaatcagatctctctactttagttagaagatgccccaatcttgtccatctagacttaagtaatagtgtcatgctaaagaatgactgctttcaggaattttcccagctcaactacctccaacacctatcactcagtcggtgctatgatataatacctgaaactttacttgaacttggagaaattcccacactaaaaacactacaagtttttggaatcgtgccagatggtacccttcaactgttaaaggaagcccttcctcatctacagattaattgctcccatttcaccaccattgccaggccaactattggcaacaaaaagaaccaggagatatggggcatcaaatgccgactgacactgcaaaagcccagttgtctatgaagtatttattgcaggatggtgtctcttctttagaacagggaaaataggcaggaagcccaattgctggagtacttagctagttttattcttggttttcccttttgcctgtcattctgcaagtatactagggagcccattttgagag

SEQ ID NO: 1506 - DNA, 1194 bp; single-stranded, linear
  immediate source library: GENBANK
  immediate source clone: g995918
ggcacgagcccagcgccgccgccatgtcctccggggctagcgcgagcgccctgcagcgcttggtagagcagctcaagttggaggctggcgtggagaggatcaaggtctctcaggcagctgcagagcttcaacagtactgtatgcagaatgcctgcaaggatgccctgctggtgggtgttccagctggaagtaaccccttccgggagcctagatcctgtgctttactctgaagactctaggagagaagtttgctgaggaatgccttcaagcacaaagtgatgaatgactgccttcaagtctcaagaaaacacttttccctaacttttagagatatttcagccctttcctgtggcctggtcctatagccaaaatcacagatattcatgagtttctacttgagtgagaaaactgggtgaaggaatagaattttaaatagtaataactgcttgttttttgtgtgcaagtacttttatacataagataaacaaaaaccttaccaccaaacataccaaaatgcacctctttcataagtgagttactaagatttctatacctggaatatcatgtatgtttcatttactggatgtttacattttaggaaggaaaatagttttgtttatttaaacaactgaatacttataaactgttgttcctggaagttatttattccataaaaaatttgttcttttctcatgaatttataattcctaaatgaagaccagaaagtacaaattgctgggaggaagaataggctttattaatcaactgatgtcttgatttttctaaatgggaagattgctttatttttaacactaattatgggagcagattcttaccaaacttctttggaaaagttaatgttatgatgtgcattaggctgccccatcgtgtatataaatgaaggcagatttgatttttgtattcttacgtttactctgctttgtagttgtggctgtacttaaagcaatacagaatttcatatatttaaaaatgtttaaaatgtgacccacagaacattgtaaatgattaaaaactaacatgaaaatattacaacctaaaagaattcttaacttcacaagtgttttacttcgacgatgtgcctttgatttaatttgggacacttttttagaaggatacattattcgtgtttgcaacggtctttgaagagcttggaaataaaatttctgcttaatt

SEQ ID NO: 1507 - DNA, 681 bp; single-stranded, linear
  immediate source library: GENBANK
  immediate source clone: g995938
gtcgacccacgcgtccggaaatctccaagtcataagacgaagaggacttcctgctcactgtaagagtcagaacaccccacaggcctgactcccttcctgtctggcttgggtggcctttacaagtaccctgtctaagctcgggagggacccgcccgtttctcagctactcccttgagcccctcaccggccacggcggtctccgaggctatctacgggtttttttcaggacaaatgatgcgaagggtggtacattagtgggggaagacaatatggaaacaaatactatgaagacaacaagcaattttttggccgtcaccgatgggttgtatatactactgaaatgaatgggcaaaaacacattctgggatgtggagggaagcatggtgcctcctgaatggcatcgttggcttcacagtatgactgatgatcctccaacaacaaaaccacttactgctcgtaaattcatttggacgaaccataatttcaacgtgactgggccccagaacaatatgtaccttattctaccactagaaagaagattcaggagtggatcccaccttcaacaccttacaagtaaagacaatgaagaacagttgaaacatgcaaaatatggagcttttcatgtaattactcttttactgtttaccattcactataattcacaattaaaattgtgtgact

SEQ ID NO: 1508 - DNA, 346 bp; single-stranded, linear
  immediate source library: GENBANK
  immediate source clone: g998534
tatttcaaggcattttctgcaggaaaacgagtgtgtgctggagaaggcctggcccgcatggagttgtttcttttgttgtgtgccattttgcagcattttaatttgaagcctctcgttgacccaaaggatatcgacctcagtcctatacatattgggtttggctgtatcccaccacgttacaaactctgtgtcattccccgctcatgagtgtgtggaggacaccctgaaccccccgctttcaaacaagatttcgaattgtttgaggtcaggatttctcaaactgattcctttctttgcatatgagtatttgaaaataaatattttcccagaatataaaaaaaaaaaa
